(19) United States
(12) Patent Application Publication
(10) Pub. No.: US 2008/0248476 A1
(43) Pub. Date: Oct. 9, 2008

(54) Genetic polymorphisms associated with myocardial infarction, methods of detection and uses thereof

(75) Inventors: Michele Cargill, Orinda, CA (US); James J. Devlin, Lafayette, CA (US); Olga Iakoubova, San Ramon, CA (US); Dov Shiffman, Palo Alto, CA (US)

Correspondence Address: CELERA, AN APPLERA BUSINESS UNIT, 1401 HARBOR BAY PARKWAY, ALAMEDA, CA, 94502, US

(73) Assignee: APPLERA CORPORATION, Norwalk, CT (US)

(21) Appl. No.: 11/977,366

(22) Filed: Oct. 23, 2007

Related U.S. Application Data
(63) Continuation of application No. 10/796,307, filed on Mar. 10, 2004, now abandoned.
(60) Provisional application No. 60/453,135, filed on Mar. 10, 2003.
(60) Provisional application No. 60/466,412, filed on Apr. 30, 2003.

(51) Int. Cl. C12Q 1/68; C07H 21/04; G01N 33/53

(52) U.S. Cl. 435/6; 536/22.1; 435/7.1

(57) ABSTRACT

The present invention is based on the discovery of genetic polymorphisms that are associated with myocardial infarction. In particular, the present invention relates to nucleic acid molecules containing the polymorphisms, variant proteins encoded by such nucleic acid molecules, reagents for detecting the polymorphic nucleic acid molecules and proteins, and methods of using the nucleic acid and proteins as well as methods of using reagents for their detection.

### CROSS-REFERENCE TO RELATED APPLICATIONS

[0001] This application is a continuation application of U.S. non-provisional application Ser. No. 10/796,307, filed Mar. 10, 2004, which claims priority to provisional application Ser. No. 60/453,115, filed Mar. 10, 2003, and provisional application Ser. No. 60/466,412, filed Apr. 30, 2003, the contents of which are hereby incorporated by reference in their entirety into this application.

### FIELD OF THE INVENTION

[0002] The present invention is in the field of myocardial infarction diagnosis and therapy. In particular, the present invention relates to specific single nucleotide polymorphisms (SNPs) in the human genome, and their association with myocardial infarction and related pathologies. Based on differences in allele frequencies in the myocardial infarction patient population relative to normal individuals, the naturally-occurring SNPs disclosed herein can be used as targets for the design of diagnostic reagents and the development of therapeutic agents, as well as for disease association and linkage analysis. In particular, the SNPs of the present invention are useful for identifying an individual who is at an increased or decreased risk of developing myocardial infarction and for early detection of the disease, for providing clinically important information for the prevention and/or treatment of myocardial infarction, and for screening and selecting therapeutic agents. The SNPs disclosed herein are also useful for human identification applications. Methods, assays, kits, and reagents for detecting the presence of these polymorphisms and their encoded products are provided.

### BACKGROUND OF THE INVENTION

[0003] Myocardial Infarction (Including Recurrent Myocardial Infarction)

[0004] Myocardial infarction (MI) is the most common cause of mortality in developed countries. It is a multifactorial disease that involves atherogenesis, thrombus formation and propagation. Thrombosis can result in complete or partial occlusion of coronary arteries. The luminal narrowing or blockage of coronary arteries reduces oxygen and nutrient supply to the cardiac muscle (cardiac ischemia), leading to myocardial necrosis and/or stunning. MI, unstable angina, or sudden ischemic death are clinical manifestations of cardiac muscle damage. All three endpoints are part of the Acute Coronary Syndrome since the underlying mechanisms of acute complications of atherosclerosis are considered to be the same.

[0005] Atherogenesis, the first step of pathogenesis of MI, is a complex interaction between blood elements, mechanical forces, disturbed blood flow, and vessel wall abnormality. On the cellular level, these include endothelial dysfunction, monocytes/macrophages activation by modified lipoproteins, monocytes/macrophages migration into the neointima and subsequent migration and proliferation of vascular smooth muscle cells (VSMC) from the media that results in plaque accumulation.

[0006] In recent years, an unstable (vulnerable) plaque was recognized as an underlying cause of arterial thrombotic events and MI. A vulnerable plaque is a plaque, often not stenotic, that has a high likelihood of becoming disrupted or eroded, thus forming a thrombogenic focus. Two vulnerable plaque morphologies have been described. A first type of vulnerable plaque morphology is a rupture of the protective fibrous cap. It can occur in plaques that have distinct morphological features such as large and soft lipid pool with distinct necrotic core and thinning of the fibrous cap in the region of the plaque shoulders. Fibrous caps have considerable metabolic activity. The imbalance between matrix synthesis and matrix degradation thought to be regulated by inflammatory mediators combined with VSMC apoptosis are the key underlying mechanisms of plaque rupture. A second type of vulnerable plaque morphology, known as “plaque erosion”, can also lead to a fatal coronary thrombotic event. Plaque erosion is morphologically different from plaque rupture. Eroded plaques do not have fractures in the plaque fibrous cap, only superficial erosion of the intima. The loss of endothelial cells can expose the thrombogenic subendothelial matrix that precipitates thrombus formation. This process could be regulated by inflammatory mediators. The propagation of the acute thrombi for both plaque rupture and plaque erosion events depends on the balance between coagulation and thrombolysis. MI due to a vulnerable plaque is a complex phenomenon that includes: plaque vulnerability, blood vulnerability (hypercoagulation, hypothrombolysis), and heart vulnerability (sensitivity of the heart to ischemia or propensity for arrhythmia).

[0007] Recurrent myocardial infarction (RMI) can generally be viewed as a severe form of MI progression caused by multiple vulnerable plaques that are able to undergo pre-rupture or a pre-erosive state, coupled with extreme blood coagulability.

[0008] The incidence of MI is still high despite currently available preventive measures and therapeutic intervention. More than 1,500,000 people in the US suffer acute MI each year (many without seeking help due to unrecognized MI), and one third of these people die. The lifetime risk of coronary artery disease events at age 40 years is 42.4% for men (one in two) and 24.9% for women (one in four) (Lloyd-Jones DM; Lancet, 1999 353: 89-92).

[0009] The current diagnosis of MI is based on the levels of troponin I or T that indicate the cardiac muscle progressive necrosis, impaired electrocardiogram (ECG), and detection of abnormal ventricular wall motion or angiographic data (the presence of acute thrombi). However, due to the asymptomatic nature of 25% of acute MIs (absence of atypical chest pain, low ECG sensitivity), a significant portion of MIs are not diagnosed and therefore not treated appropriately (e.g., prevention of recurrent MIs).

[0010] Despite a very high prevalence and lifetime risk of MI, there are no good prognostic markers that can identify an individual with a high risk of vulnerable plaques and justify preventive treatments. MI risk assessment and prognosis is currently done using classic risk factors or the recently introduced Framingham Risk Index. Both of these assessments put a significant weight on LDL levels to justify preventive treatment. However, it is well established that half of all MIs occur in individuals without overt hyperlipidemia. Hence, there is a need for additional risk factors for predicting predisposition to MI.

[0011] Other emerging risk factors are inflammatory biomarkers such as C-reactive protein (CRP), ICAM-1, SAA, TNF α, homocysteine, impaired fasting glucose, new lipid markers (ox LDL, Lp-a, MAD-LDL, etc.) and pro-thrombotic factors (fibrinogen, PAI-1). Despite showing some promise, these markers have significant limitations such as low specificity and low positive predictive value, and the need for multiple reference intervals to be used for different groups of people (e.g., males-females, smokers-non smokers, hormone replacement therapy users, different age groups). These limitations diminish the utility of such markers as independent prognostic markers for MI screening.

[0012] Genetics plays an important role in MI risk. Families with a positive family history of MI account for 14% of the general population, 72% of premature MIs, and 48% of all MIs (Williams R R, Am J Cardiology, 2001; 87:129). In addition, replicated linkage studies have revealed evidence of multiple regions of the genome that are associated with MI and relevant to MI genetic traits, including regions on chromosomes 14, 2, 3 and 7 (Broeckel U, Nature Genetics, 2002; 30: 210; Harrap S, Arterioscler Thromb Vasc Biol, 2002; 22: 874-878, Shearman A, Human Molecular Genetics, 2000, 9; 9,1315-1320), implying that genetic risk factors influence the onset, manifestation, and progression of MI. Recent association studies have identified allelic variants that are associated with acute complications of coronary heart disease, including allelic variants of the ApoE, ApoA5, Lpa, APOCIII, and Klotho genes.

[0013] Genetic markers such as single nucleotide polymorphisms are preferable to other types of biomarkers. Genetic markers that are prognostic for MI can be genotyped early in life and could predict individual response to various risk factors. The combination of serum protein levels and genetic predisposition revealed by genetic analysis of susceptibility genes can provide an integrated assessment of the interaction between genotypes and environmental factors, resulting in synergistically increased prognostic value of diagnostic tests.

[0014] Thus, there is an urgent need for novel genetic markers that are predictive of predisposition to MI, particularly for individuals who are unrecognized as having a predisposition to MI. Such genetic markers may enable prognosis of MI in much larger populations compared with the populations which can currently be evaluated by using existing risk factors and biomarkers. The availability of a genetic test may allow, for example, appropriate preventive treatments for acute coronary events to be provided for susceptible individuals (such preventive treatments may include, for example, statin treatments and statin dose escalation, as well as changes to modifiable risk factors), lowering of the thresholds for ECG and angiography testing, and allow adequate monitoring of informative biomarkers.

[0015] Moreover, the discovery of genetic markers associated with MI will provide novel targets for therapeutic intervention or preventive treatments of MI, and enable the development of new therapeutic agents for treating MI and other cardiovascular disorders.

[0016] SNPs

[0017] The genomes of all organisms undergo spontaneous mutation in the course of their continuing evolution, generating variant forms of progenitor genetic sequences (Gusella, Ann. Rev. Biochem. 55, 831-854 (1986)). A variant form may confer an evolutionary advantage or disadvantage relative to a progenitor form or may be neutral. In some instances, a variant form confers an evolutionary advantage to the species and is eventually incorporated into the DNA of many or most members of the species and effectively becomes the progenitor form. Additionally, the effects of a variant form may be both beneficial and detrimental, depending on the circumstances. For example, a heterozygous sickle cell mutation confers resistance to malaria, but a homozygous sickle cell mutation is usually lethal. In many cases, both progenitor and variant forms survive and co-exist in a species population. The coexistence of multiple forms of a genetic sequence gives rise to genetic polymorphisms, including SNPs.

[0018] Approximately 90% of all polymorphisms in the human genome are SNPs. SNPs are single base positions in DNA at which different alleles, or alternative nucleotides, exist in a population. The SNP position (interchangeably referred to herein as SNP, SNP site, SNP locus, SNP marker, or marker) is usually preceded by and followed by highly conserved sequences of the allele (e.g., sequences that vary in less than 1/100 or 1/1000 members of the populations). An individual may be homozygous or heterozygous for an allele at each SNP position. A SNP can, in some instances, be referred to as a “cSNP” to denote that the nucleotide sequence containing the SNP is an amino acid coding sequence.

[0019] A SNP may arise from a substitution of one nucleotide for another at the polymorphic site. Substitutions can be transitions or transversions. A transition is the replacement of one purine nucleotide by another purine nucleotide, or one pyrimidine by another pyrimidine. A transversion is the replacement of a purine by a pyrimidine, or vice versa. A SNP may also be a single base insertion or deletion variant referred to as an “indel” (Weber et al., “Human diallelic insertion/deletion polymorphisms”, Am J Hum Genet October 2002;71(4):854-62).

[0020] A synonymous codon change, or silent mutation/SNP (terms such as “SNP”, “polymorphism”, “mutation”, “mutant”, “variation”, and “variant” are used herein interchangeably), is one that does not result in a change of amino acid due to the degeneracy of the genetic code. A substitution that changes a codon coding for one amino acid to a codon coding for a different amino acid (i.e., a non-synonymous codon change) is referred to as a missense mutation. A nonsense mutation results in a type of non-synonymous codon change in which a stop codon is formed, thereby leading to premature termination of a polypeptide chain and a truncated protein. A read-through mutation is another type of non-synonymous codon change that causes the destruction of a stop codon, thereby resulting in an extended polypeptide product. While SNPs can be bi-, tri-, or tetra-allelic, the vast majority of the SNPs are bi-allelic, and are thus often referred to as “bi-allelic markers”, or “di-allelic markers”.

[0021] As used herein, references to SNPs and SNP genotypes include individual SNPs and/or haplotypes, which are groups of SNPs that are generally inherited together. Haplotypes can have stronger correlations with diseases or other phenotypic effects compared with individual SNPs, and therefore may provide increased diagnostic accuracy in some cases (Stephens et al. Science 293, 489-493, 20 Jul. 2001).

[0022] Causative SNPs are those SNPs that produce alterations in gene expression or in the expression, structure, and/or function of a gene product, and therefore are most predictive of a possible clinical phenotype. One such class includes SNPs falling within regions of genes encoding a polypeptide product, i.e. cSNPs. These SNPs may result in an alteration of the amino acid sequence of the polypeptide product (i.e., non-synonymous codon changes) and give rise to the expression of a defective or other variant protein. Furthermore, in the case of nonsense mutations, a SNP may lead to premature termination of a polypeptide product. Such variant products can result in a pathological condition, e.g., genetic disease. Examples of genes in which a SNP within a coding sequence causes a genetic disease include sickle cell anemia and cystic fibrosis.

[0023] Causative SNPs do not necessarily have to occur in coding regions; causative SNPs can occur in, for example, any genetic region that can ultimately affect the expression, structure, and/or activity of the protein encoded by a nucleic acid. Such genetic regions include, for example, those involved in transcription, such as SNPs in transcription factor binding domains, SNPs in promoter regions, in areas involved in transcript processing, such as SNPs at intron-exon boundaries that may cause defective splicing, or SNPs in mRNA processing signal sequences such as polyadenylation signal regions. Some SNPs that are not causative SNPs nevertheless are in close association with, and therefore segregate with, a disease-causing sequence. In this situation, the presence of a SNP correlates with the presence of, or predisposition to, or an increased risk in developing the disease. These SNPs, although not causative, are nonetheless also useful for diagnostics, disease predisposition screening, and other uses.

[0024] An association study of a SNP and a specific disorder involves determining the presence or frequency of the SNP allele in biological samples from individuals with the disorder of interest, such as myocardial infarction, and comparing the information to that of controls (i.e., individuals who do not have the disorder; controls may be also referred to as “healthy” or “normal” individuals) who are preferably of similar age and race. The appropriate selection of patients and controls is important to the success of SNP association studies. Therefore, a pool of individuals with well-characterized phenotypes is extremely desirable.

[0025] A SNP may be screened in diseased tissue samples or any biological sample obtained from a diseased individual, and compared to control samples, and selected for its increased (or decreased) occurrence in a specific pathological condition, such as pathologies related to myocardial infarction. Once a statistically significant association is established between one or more SNP(s) and a pathological condition (or other phenotype) of interest, then the region around the SNP can optionally be thoroughly screened to identify the causative genetic locus/sequence(s) (e.g., causative SNP/mutation, gene, regulatory region, etc.) that influences the pathological condition or phenotype. Association studies may be conducted within the general population and are not limited to studies performed on related individuals in affected families (linkage studies).

[0026] Clinical trials have shown that patient response to treatment with pharmaceuticals is often heterogeneous. There is a continuing need to improve pharmaceutical agent design and therapy. In that regard, SNPs can be used to identify patients most suited to therapy with particular pharmaceutical agents (this is often termed “pharmacogenomics”). Similarly, SNPs can be used to exclude patients from certain treatment due to the patient's increased likelihood of developing toxic side effects or their likelihood of not responding to the treatment. Pharmacogenomics can also be used in pharmaceutical research to assist the drug development and selection process. (Linder et al. (1997), Clinical Chemistry, 43, 254; Marshall (1997), Nature Biotechnology, 15, 1249; International Patent Application WO 97/40462, Spectra Biomedical; and Schafer et al. (1998), Nature Biotechnology, 16, 3).

### SUMMARY OF THE INVENTION

[0027] The present invention relates to the identification of novel SNPs, unique combinations of such SNPs, and haplotypes of SNPs that are associated with myocardial infarction and related pathologies. The polymorphisms disclosed herein are directly useful as targets for the design of diagnostic reagents and the development of therapeutic agents for use in the diagnosis and treatment of myocardial infarction and related pathologies.

[0028] Based on the identification of SNPs associated with myocardial infarction, the present invention also provides methods of detecting these variants as well as the design and preparation of detection reagents needed to accomplish this task. The invention specifically provides novel SNPs in genetic sequences involved in myocardial infarction, variant proteins encoded by nucleic acid molecules containing such SNPs, antibodies to the encoded variant proteins, computer-based and data storage systems containing the novel SNP information, methods of detecting these SNPs in a test sample, methods of identifying individuals who have an altered (i.e., increased or decreased) risk of developing myocardial infarction based on the presence of a SNP disclosed herein or its encoded product, methods of identifying individuals who are more or less likely to respond to a treatment, methods of screening for compounds useful in the treatment of a disorder associated with a variant gene/protein, compounds identified by these methods, methods of treating disorders mediated by a variant gene/protein, and methods of using the novel SNPs of the present invention for human identification.

[0029] In Tables 1-2, the present invention provides gene information, transcript sequences (SEQ ID NOS:1-29), encoded amino acid sequences (SEQ ID NOS:30-58), genomic sequences (SEQ ID NOS:91-99), transcript-based context sequences (SEQ ID NOS:59-90) and genomic-based context sequences (SEQ ID NOS:100-109) that contain the SNPs of the present invention, and extensive SNP information that includes observed alleles, allele frequencies, populations/ethnic groups in which alleles have been observed, information about the type of SNP and corresponding functional effect, and, for cSNPs, information about the encoded polypeptide product. The transcript sequences (SEQ ID NOS:1-29), amino acid sequences (SEQ ID NOS:30-58), genomic sequences (SEQ ID NOS:91-99), transcript-based SNP context sequences (SEQ ID NOS: 59-90), and genomic-based SNP context sequences (SEQ ID NOS:100-109) are also provided in the Sequence Listing.

[0030] In a specific embodiment of the present invention, SNPs which occur naturally in the human genome are provided as isolated nucleic acid molecules. These SNPs are associated with myocardial infarction such that they can have a variety of uses in the diagnosis and/or treatment of myocardial infarction. One aspect of the present invention relates to an isolated nucleic acid molecule comprising a nucleotide sequence in which at least one nucleotide is a SNP disclosed in Tables 3 and/or 4. In an alternative embodiment, a nucleic acid of the invention is an amplified polynucleotide, which is produced by amplification of a SNP-containing nucleic acid template. In another embodiment, the invention provides for a variant protein which is encoded by a nucleic acid molecule containing a SNP disclosed herein.

[0031] In yet another embodiment of the invention, a reagent for detecting a SNP in the context of its naturally-occurring flanking nucleotide sequences (which can be, e.g., either DNA or mRNA) is provided. In particular, such a reagent may be in the form of, for example, a hybridization probe or an amplification primer that is useful in the specific detection of a SNP of interest. In an alternative embodiment, a protein detection reagent is used to detect a variant protein which is encoded by a nucleic acid molecule containing a SNP disclosed herein. A preferred embodiment of a protein detection reagent is an antibody or an antigen-reactive antibody fragment.

[0032] Also provided in the invention are kits comprising SNP detection reagents, and methods for detecting the SNPs disclosed herein by employing detection reagents. In a specific embodiment, the present invention provides for a method of identifying an individual having an increased or decreased risk of developing myocardial infarction by detecting the presence or absence of a SNP allele disclosed herein. In another embodiment, a method for diagnosis of myocardial infarction by detecting the presence or absence of a SNP allele disclosed herein is provided.

[0033] The nucleic acid molecules of the invention can be inserted in an expression vector, such as to produce a variant protein in a host cell. Thus, the present invention also provides for a vector comprising a SNP-containing nucleic acid molecule, genetically-engineered host cells containing the vector, and methods for expressing a recombinant variant protein using such host cells. In another specific embodiment, the host cells, SNP-containing nucleic acid molecules, and/or variant proteins can be used as targets in a method for screening and identifying therapeutic agents or pharmaceutical compounds useful in the treatment of myocardial infarction.

[0034] An aspect of this invention is a method for treating myocardial infarction in a human subject wherein said human subject harbors a gene, transcript, and/or encoded protein identified in Tables 1-2, which method comprises administering to said human subject a therapeutically or prophylactically effective amount of one or more agents counteracting the effects of the disease, such as by inhibiting (or stimulating) the activity of the gene, transcript, and/or encoded protein identified in Tables 1-2.

[0035] Another aspect of this invention is a method for identifying an agent useful in therapeutically or prophylactically treating myocardial infarction in a human subject wherein said human subject harbors a gene, transcript, and/or encoded protein identified in Tables 1-2, which method comprises contacting the gene, transcript, or encoded protein with a candidate agent under conditions suitable to allow formation of a binding complex between the gene, transcript, or encoded protein and the candidate agent and detecting the formation of the binding complex, wherein the presence of the complex identifies said agent.

[0036] Another aspect of this invention is a method for treating myocardial infarction in a human subject, which method comprises:

[0037] (i) determining that said human subject harbors a gene, transcript, and/or encoded protein identified in Tables 1-2, and

[0038] (ii) administering to said subject a therapeutically or prophylactically effective amount of one or more agents counteracting the effects of the disease.

[0039] Many other uses and advantages of the present invention will be apparent to those skilled in the art upon review of the detailed description of the preferred embodiments herein. Solely for clarity of discussion, the invention is described in the sections below by way of non-limiting examples.

### DESCRIPTION OF THE FILES CONTAINED ON THE CD-R NAMED CL001509CON1 CDR

[0040] Each of the CD-Rs contains the following (ASCII) file:

[0041] File SEQLIST_CL1509CON1.txt provides the Sequence Listing. The Sequence Listing provides the transcript sequences (SEQ ID NOS:1-29) and protein sequences (SEQ ID NOS:30-58) as shown in Table 1, and genomic sequences (SEQ ID NOS:91-99) as shown in Table 2, for each myocardial infarction-associated gene that contains one or more SNPs of the present invention. Also provided in the Sequence Listing are context sequences flanking each SNP, including both transcript-based context sequences as shown in Table 1 (SEQ ID NOS:59-90) and genomic-based context sequences as shown in Table 2 (SEQ ID NOS:100-109).

[0042] In addition, the Sequence Listing provides the primer sequences from Table 5 (SEQ ID NOS: 110-139), which are oligonucleotides that have been synthesized and used in the laboratory to assay the SNPs disclosed in Tables 6-8 during the course of association studies to verify the association of these SNPs with MI.

[0043] The context sequences generally provide 100 bp upstream (5′) and 100 bp downstream (340 ) of each SNP, with the SNP in the middle of the context sequence, for a total of 200 bp of context sequence surrounding each SNP.

[0044] File SEQLIST_CL1509CON1.txt is 1,398 KB in size, and was created on Oct. 18, 2007. A computer readable format of the sequence listing is also submitted herein on a separate CDR labeled CRF. The information recorded in the CRF CDR is identical to the sequence listing as provided on the CDR Duplicate Copy 1 and Duplicate Copy 2.

[0045] The material contained on the CD-R labeled CL1509CON1 is hereby incorporated by reference pursuant to 37 CFR 1.77(b)(4).

### DESCRIPTION OF TABLE 1 AND TABLE 2

[0046] Table 1 and Table 2 disclose the SNP and associated gene/transcript/protein information of the present invention. For each gene, Table 1 and Table 2 each provide a header containing gene/transcript/protein information, followed by a transcript and protein sequence (in Table 1) or genomic sequence (in Table 2), and then SNP information regarding each SNP found in that gene/transcript.

[0047] NOTE: SNPs may be included in both Table 1 and Table 2; Table 1 presents the SNPs relative to their transcript sequences and encoded protein sequences, whereas Table 2 presents the SNPs relative to their genomic sequences (in some instances Table 2 may also include, after the last gene sequence, genomic sequences of one or more intergenic regions, as well as SNP context sequences and other SNP information for any SNPs that lie within these intergenic regions). SNPs can readily be cross-referenced between Tables based on their hCV (or, in some instances, hDV) identification numbers.

[0048] The gene/transcript/protein information includes:

[0049] a gene number (1 through n, where n=the total number of genes in the Table)

[0050] a Celera hCG and UID internal identification numbers for the gene

[0051] a Celera hCT and UID internal identification numbers for the transcript (Table 1 only)

[0052] a public Genbank accession number (e.g., RefSeq NM number) for the transcript (Table 1 only)

[0053] a Celera hCP and UID internal identification numbers for the protein encoded by the hCT transcript (Table 1 only)

[0054] a public Genbank accession number (e.g., RefSeq NP number) for the protein (Table 1 only)

[0055] an art-known gene symbol

[0056] an art-known gene/protein name

[0057] Celera genomic axis position (indicating start nucleotide position-stop nucleotide position)

[0058] the chromosome number of the chromosome on which the gene is located

[0059] an OMIM (Online Mendelian Inheritance in Man; Johns Hopkins University/NCBI) public reference number for obtaining further information regarding the medical significance of each gene

[0060] alternative gene/protein name(s) and/or symbol(s) in the OMIM entry

[0061] NOTE: Due to the presence of alternative splice forms, multiple transcript/protein entries can be provided for a single gene entry in Table 1; i.e., for a single Gene Number, multiple entries may be provided in series that differ in their transcript/protein information and sequences.

[0062] Following the gene/transcript/protein information is a transcript sequence and protein sequence (in Table 1), or a genomic sequence (in Table 2), for each gene, as follows:

[0063] transcript sequence (Table 1 only) (corresponding to SEQ ID NOS:1-29 of the Sequence Listing), with SNPs identified by their IUB codes (transcript sequences can include 5′ UTR, protein coding, and 3′ UTR regions). (NOTE: If there are differences between the nucleotide sequence of the hCT transcript and the corresponding public transcript sequence identified by the Genbank accession number, the hCT transcript sequence (and encoded protein) is provided, unless the public sequence is a RefSeq transcript sequence identified by an NM number, in which case the RefSeq NM transcript sequence (and encoded protein) is provided. However, whether the hCT transcript or RefSeq NM transcript is used as the transcript sequence, the disclosed SNPs are represented by their IUB codes within the transcript.)

[0064] the encoded protein sequence (Table 1 only) (corresponding to SEQ ID NOS:30-58 of the Sequence Listing)

[0065] the genomic sequence of the gene (Table 2 only), including 6 kb on each side of the gene boundaries (i.e., 6 kb on the 5′ side of the gene plus 6 kb on the 3′ side of the gene) (corresponding to SEQ ID NOS:91-99 of the Sequence Listing).

[0066] After the last gene sequence, Table 2 may include additional genomic sequences of intergenic regions (in such instances, these sequences are identified as “Intergenic region:” followed by a numerical identification number), as well as SNP context sequences and other SNP information for any SNPs that lie within each intergenic region (and such SNPs are identified as “INTERGENIC” for SNP type).

[0067] NOTE: The transcript, protein, and transcript-based SNP context sequences are provided in both Table 1 and in the Sequence Listing. The genomic and genomic-based SNP context sequences are provided in both Table 2 and in the Sequence Listing. SEQ ID NOS are indicated in Table 1 for each transcript sequence (SEQ ID NOS:1-29), protein sequence (SEQ ID NOS:30-58), and transcript-based SNP context sequence (SEQ ID NOS:59-90), and SEQ ID NOS are indicated in Table 2 for each genomic sequence (SEQ ID NOS:91-99), and genomic-based SNP context sequence (SEQ ID NOS:100-109).

[0068] The SNP information includes:

[0069] context sequence (taken from the transcript sequence in Table 1, and taken from the genomic sequence in Table 2) with the SNP represented by its IUB code, including 100 bp upstream (5′) of the SNP position plus 100 bp downstream (3′) of the SNP position (the transcript-based SNP context sequences in Table 1 are provided in the Sequence Listing as SEQ ID NOS:59-90; the genomic-based SNP context sequences in Table 2 are provided in the Sequence Listing as SEQ ID NOS:100-109).

[0070] Celera hCV internal identification number for the SNP (in some instances, an “hDV” number is given instead of an “hCV” number)

[0071] SNP position [position of the SNP within the given transcript sequence (Table 1) or within the given genomic sequence (Table 2)]

[0072] SNP source (may include any combination of one or more of the following five codes, depending on which internal sequencing projects and/or public databases the SNP has been observed in: “Applera”=SNP observed during the re-sequencing of genes and regulatory regions of 39 individuals, “Celera”=SNP observed during shotgun sequencing and assembly of the Celera human genome sequence, “Celera Diagnostics”=SNP observed during re-sequencing of nucleic acid samples from individuals who have myocardial infarction or a related pathology, “dbSNP”=SNP observed in the dbSNP public database, “HGBASE”=SNP observed in the HGBASE public database, “HGMD”=SNP observed in the Human Gene Mutation Database (HGMD) public database) (NOTE: multiple “Applera” source entries for a single SNP indicate that the same SNP was covered by multiple overlapping amplification products and the re-sequencing results (e.g., observed allele counts) from each of these amplification products is being provided)

[0073] Population/allele/allele count information in the format of [population1(first_allele count|second_allele,count)population2(first_allele,count|second_allele,count) total (first_allele,total count|second_allele,total count)]. The information in this field includes populations/ethnic groups in which particular SNP alleles have been observed (“cau”=Caucasian, “his”=Hispanic, “chn”=Chinese, and “afr”=African-American, “jpn”=Japanese, “ind”=Indian, “mex”=Mexican, “ain”=“American Indian, “cra”=Celera donor, “no_pop”=no population information available), identified SNP alleles, and observed allele counts (within each population group and total allele counts), where available [“-” in the allele field represents a deletion allele of an insertion/deletion (“indel”) polymorphism (in which case the corresponding insertion allele, which may be comprised of one or more nucleotides, is indicated in the allele field on the opposite side of the “|”); “-” in the count field indicates that allele count information is not available].

[0074] NOTE: For SNPs of “Applera” SNP source, genes/regulatory regions of 39 individuals (20 Caucasians and 19 African Americans) were re-sequenced and, since each SNP position is represented by two chromosomes in each individual (with the exception of SNPs on X and Y chromosomes in males, for which each SNP position is represented by a single chromosome), up to 78 chromosomes were genotyped for each SNP position. Thus, the sum of the African-American (“afr”) allele counts is up to 38, the sum of the Caucasian allele counts (“cau”) is up to 40, and the total sum of all allele counts is up to 78.

[0075] (NOTE: semicolons separate population/allele/count information corresponding to each indicated SNP source; i.e., if four SNP sources are indicated, such as “Celera”, “dbSNP”, “HGBASE”, and “HGMD”, then population/allele/count information is provided in four groups which are separated by semicolons and listed in the same order as the listing of SNP sources, with each population/allele/count information group corresponding to the respective SNP source based on order; thus, in this example, the first population/allele/count information group would correspond to the first listed SNP source (Celera) and the third population/allele/count information group separated by semicolons would correspond to the third listed SNP source (HGBASE); if population/allele/count information is not available for any particular SNP source, then a pair of semicolons is still inserted as a place-holder in order to maintain correspondence between the list of SNP sources and the corresponding listing of population/allele/count information)

[0076] SNP type (e.g., location within gene/transcript and/or predicted functional effect) [“MIS-SENSE MUTATION“=SNP causes a change in the encoded amino acid (i.e., a non-synonymous coding SNP); “SILENT MUTATION”=SNP does not cause a change in the encoded amino acid (i.e., a synonymous coding SNP); “STOP CODON MUTATION”=SNP is located in a stop codon; “NONSENSE MUTATION”=SNP creates or destroys a stop codon; “UTR 5”=SNP is located in a 5′ UTR of a transcript; “UTR 3”=SNP is located in a 3′ UTR of a transcript; “PUTATIVE UTR 5”=SNP is located in a putative 5′ UTR; “PUTATIVE UTR 3”=SNP is located in a putative 3′ UTR; “DONOR SPLICE SITE”=SNP is located in a donor splice site (5′ intronl boundary); “ACCEPTOR SPLICE SITE”=SNP is located in an acceptor splice site (3′ intron boundary); “CODING REGION”=SNP is located in a protein-coding region of the transcript; “EXON”=SNP is located in an exon; “INTRON”=SNP is located in an intron; “hmCS”=SNP is located in a human-mouse conserved segment; “TFBS”=SNP is located in a transcription factor binding site; “UNKNOWN”=SNP type is not defined; “INTERGENIC”=SNP is intergenic, i.e., outside of any gene boundary]

[0077] Protein coding information (Table 1 only), where relevant, in the format of [protein SEQ ID NO:#, amino acid position, (amino acid-1, codon1) (amino acid-2, codon2)]. The information in this field includes SEQ ID NO of the encoded protein sequence, position of the amino acid residue within the protein identified by the SEQ ID NO that is encoded by the codon containing the SNP, amino acids (represented by one-letter amino acid codes) that are encoded by the alternative SNP alleles (in the case of stop codons, “X” is used for the one-letter amino acid code), and alternative codons containing the alternative SNP nucleotides which encode the amino acid residues (thus, for example, for missense mutation-type SNPs, at least two different amino acids and at least two different codons are generally indicated; for silent mutation-type SNPs, one amino acid and at least two different codons are generally indicated, etc.). In instances where the SNP is located outside of a protein-coding region (e.g., in a UTR region), “None” is indicated following the protein SEQ ID NO.

### DESCRIPTION OF TABLE 3 AND TABLE 4

[0078] Tables 3 and 4 provide a list of a subset of SNPs from Table 1 (in the case of Table 3) or Table 2 (in the case of Table 4) for which the SNP source falls into one of the following three categories: 1) SNPs for which the SNP source is only “Applera” and none other, 2) SNPs for which the SNP source is only “Celera Diagnostics” and none other, and 3) SNPs for which the SNP source is both “Applera” and “Celera Diagnostics” but none other.

[0079] These SNPs have not been observed in any of the public databases (dbSNP, HGBASE, and HGMD), and were also not observed during shotgun sequencing and assembly of the Celera human genome sequence (i.e., “Celera” SNP source). Tables 3 and 4 provide the hCV identification number (or hDV identification number for SNPs having “Celera Diagnostics” SNP source) and the SEQ ID NO of the context sequence for each of these SNPs.

### DESCRIPTION OF TABLE 5

[0080] Table 5 provides sequences (SEQ ID NOS:110-139) of primers that have been synthesized and used in the laboratory to carry out allele-specific PCR reactions in order to assay the SNPs disclosed in Tables 6-8 during the course of myocardial infarction association studies.

[0081] Table 5 provides the following:

[0082] the column labeled “Marker” provides an hCV identification number for each SNP site

[0083] the column labeled “Alleles” designates the two alternative alleles at the SNP site identified by the hCV identification number that are targeted by the allele-specific primers (the allele-specific primers are shown as “Sequence A” and “Sequence B”) [NOTE: Alleles may be presented in Table 5 based on a different orientation (i.e., the reverse complement) relative to how the same alleles are presented in Tables 1-2]

[0084] the column labeled “sequence A (allele-specific primer)” provides an allele-specific primer that is specific for the first allele designated in the “Alleles” column

[0085] the column labeled “Sequence B (allele-specific primer)” provides an allele-specific primer that is specific for the second allele designated in the “Alleles” column

[0086] the column labeled “Sequence C (common primer)” provides a common primer that is used in conjunction with each of the allele-specific primers (the “Sequence A” primer and the “Sequence B” primer) and which hybridizes at a position away from the SNP site.

[0087] All primer sequences are given in the 5′ to 3′ direction.

[0088] Each of the alleles designated in the “Alleles” column matches (or is the reverse complement of, depending on the orientation of the primer relative to the designated allele) the 3′ nucleotide of the allele-specific primer that is specific for that allele. Thus, the first allele designated in the “Alleles” column matches (or is the reverse complement of) the 3′ nucleotide of the “Sequence A” primer, and the second allele designated in the “Alleles” column matches (or is the reverse complement of) the 3′ nucleotide of the “Sequence B” primer.

### DESCRIPTION OF TABLES 6-8

[0089] Tables 6-8 provide results of statistical analyses for SNPs disclosed in Tables 1-5 (SNPs can be cross-referenced between Tables based on their hCV identification numbers). The SNPs presented in Tables 6-8 have shown a statistically significant association with myocardial infarction (MI) and/or recurrent myocardial infarction (RMI) in at least one of two independently collected sample sets. Table 6 provides statistical results for association of SNPs with MI, and Tables 7-8 provides statistical results for association of SNPs with RMI/MI. The statistical results shown in Tables 6-8 provide support for the association of these SNPs with MI and/or RMI. For example, the statistical results provided in Tables 6-8 show that the association of these SNPs with MI and/or RMI is supported by p-values <0.05 in an allelic association test and/or at least one of two genotypic association tests. Moreover, the majority of the SNPs presented in Tables 6-8 are SNPs for which their association with MI and/or RMI has been replicated by virtue of being significant in at least two independently collected sample sets, which further verifies the association of these SNPs with MI and/or RMI. Furthermore, results of stratification-based analyses are also provided where available; stratification-based analysis can, for example, enable increased prediction of MI and/or RMI risk via interaction between conventional risk factors (stratum) and SNPs.

[0090] The statistical results provided in Table 7 show association of SNPs with RMI and/or MI replicated between study S12 and either the Cohort, Pre-CARE, or During-CARE studies. The statistical results provided in Table 8 show association of SNPs with RMI replicated between Pre-CARE and During-CARE studies. These replicated results provided in Tables 7-8 further confirm the association of these SNPs with MI and/or RMI.

[0091] NOTE: SNPs can be cross-referenced between Tables 1-8 based on the hCV identification number of each SNP. However, seven of the SNPs that are included in Tables 1-8 may possess two different hCV identification numbers, as follows:
[0092] hCV11975563 is equivalent to hCV27243130
[0093] hCV15805367 is equivalent to hCV26647840
[0094] hCV15954570 is equivalent to hCV22271851
[0095] hCV15965459 is equivalent to hCV22274416
[0096] hCV2848651 is equivalent to hCV27456767
[0097] hCV7591528 is equivalent to hCV25618313
[0098] hCV9626088 is equivalent to hCV26809148
   Description of column headings for Table 6:

| Table 6 | |
|---|---|
| column | |
| heading | Definition |
| Marker | Internal hCV identification number for the SNP that is tested |
| Allele | Nucleotide (allele) of the tested SNP for which statistical results |
| | are being reported [NOTE: Alleles may be presented in Table 6 |
| | based on a different orientation (i.e., the reverse complement) |
| | relative to how the same allele is presented in Tables 1-2] |
| Study | Internal identification number for the sample set used in the |
| | analysis (S12 and S28 are two independently collected sample |
| | sets. Thus, SNPs for which data are presented for both the S12 |
| | and the S28 sample sets have had their association with |
| | myocardial infarction replicated in two independently collected |
| | sample sets, thereby further verifying the association of these |
| | SNPs with myocardial infarction. SNPs for which data are |
| | presented for either the S12 or the S28 sample set, but not both, |
| | have a significant association with myocardial infarction in one |
| | sample set but have not been tested in the other sample set.) |
| Strata | Indicates what substratum was used in the analysis (strata are |
| | described below) |
| Design | Identifies the inclusion/exclusion criteria for cases and controls |
| | (described below) |
| OR | Allelic odds ratio |
| p-value | Result of the Fisher exact test for allelic association |

Definition of entries in the “Strata” column (Table 6) for stratification-based analyses:

| Strata | Definition |
|---|---|
| ALL | All individuals |
| M | Male individuals |
| F | Female individuals |
| sm | Individuals with history of smoking |
| non sm | Individuals with no history of smoking |

Definition of entries in the “Design” column (Table 6):

| Status | Definition |
|---|---|
| ALL | All MI cases compared |
| | to all controls |
| Y-O | MI cases younger than |
| | median of samples |
| | compared to controls |
| | older than median of |
| | sample |
| MI_LS | MI cases compared to |
| | controls with low |
| | stenosis score |

Description of column headings for Tables 7-8:

| Table 7 | |
|---|---|
| & 8 | |
| column | |
| heading | Definition |
| hCG | Internal hCG Identification number for the gene that contains the |
| | tested SNP |
| Gene | Locus Link HUGO approved gene symbol for the gene that |
| Name | contains the tested SNP |
| Marker | Internal hCV identification number for the tested SNP |
| p-value | Result of the asymptotic chi square test for allelic association, |
| | dominant genotypic association, recessive genotypic association, |
| | or the allelic, dominant, or recessive p-value of the stratified |
| | analysis |
| OR | Odds ratio |
| Mode | The mode of inheritance |
| Allele | Nucleotide (allele) of the tested SNP for which statistical results |
| | are being reported [NOTE: Alleles may be presented in Tables |
| | 7-8 based on a different orientation (i.e., the reverse |
| | complement) relative to how the same allele is presented in |
| | Tables 1-2] |
| Strata | Indicates if the analysis of the dataset was based on a substratum |
| | such as gender, age, BMI, hypertension, fasting glucose levels, |
| | etc. (strata are described below) |
| Status | Sample set used in the analysis: During-CARE, Pre-CARE, or |
| Name | S12 (STATUS_ALLCASE_VS_ALL CONTROL, |
| | STATUS12_LT60CASE_VS_GT75CONTROL, and |
| | STATUS3_ALLCASE_VS_LT75CONTROL are from study |
| | S12). |

Definition of entries in the “Strata” column (Tables 7-8) for stratification-based analyses:

| Stratum | Definition |
|---|---|
| BMI_TERTILE_1 | Individuals in the lowest tertile of body mass index; T1 <= 25.3 |
| BMI_TERTILE_2 | Individuals in the middle tertile of body mass index; |
| | 25.3 < T2 < 28.5 |
| BMI_TERTILE_3 | Individuals in the highest tertile of body mass index; |
| | T3 >= 28.5 |
| PLACEBO | Patients who were in the placebo arm of the CARE trial |
| PRAVASTATIN | Patients who were in the Pravastatin arm of the CARE |
| | trial |
| MALE | Only male individuals |
| FEMALE | Only female individuals |
| HYPERTEN_Yes | Individuals with a history of hypertension |
| HYPERTEN_No | Individuals with no history of hypertension |
| GLUCOSE_TERTILE_1 | Individuals in the lowest tertile of fasting glucose levels; |
| | T1 < 84.3 |
| GLUCOSE_TERTILE_2 | Individuals in the middle tertile of fasting glucose levels; |
| | 84.3 < T2 < 95.2 |
| GLUCOSE_TERTILE_3 | Individuals in the highest tertile of fasting glucose levels; |
| | T3 >= 95.2 |
| AGE_TERTILE_1 | Individuals in the lowest tertile of age; T1 < 55 |
| AGE_TERTILE_2 | Individuals in the middle tertile of age; 55 < T2 < 64 |
| AGE_TERTILE_3 | Individuals in the highest tertile age; T3 >= 64 |
| Smoke_No | Individuals who never smoked |
| Smoke_Yes | Former smokers or current smokers |
| FMHX_Yes | Individuals with family history of CHD |
| FMHX_No | Individuals with no family history of CHD |

Definition of entries in the “Status Name” column (Tables 7-8):

| Status Name | Definition |
|---|---|
| STATUS_ALLCASE_VS_ALL CONTROL | Patients regardless of age were used in the |
| | analysis |
| STATUS12_LT60CASE_VS_GT75CONTROL | Cases were less than 60 years old and the controls |
| | were greater than 75 years old |
| STATUS3_ALLCASE_VS_LT75CONTROL | Controls were less than 75 years old |
| During-CARE | Cases had RMI during CARE; controls were a |
| | subset of CARE |
| Pre-CARE | Cases had an MI prior to the MI at CARE |
| | enrollment; controls were a subset of CARE |
| Cohort | Cases had RMI during CARE; all CARE controls |

### DETAILED DESCRIPTION OF THE INVENTION

[0099] The present invention provides SNPs associated with myocardial infarction, nucleic acid molecules containing SNPs, methods and reagents for the detection of the SNPs disclosed herein, uses of these SNPs for the development of detection reagents, and assays or kits that utilize such reagents. The myocardial infarction-associated SNPs disclosed herein are useful for diagnosing, screening for, and evaluating predisposition to myocardial infarction and related pathologies in humans. Furthermore, such SNPs and their encoded products are useful targets for the development of therapeutic agents.

[0100] A large number of SNPs have been identified from re-sequencing DNA from 39 individuals, and they are indicated as “Applera” SNP source in Tables 1-2. Their allele frequencies observed in each of the Caucasian and African-American ethnic groups are provided. Additional SNPs included herein were previously identified during shotgun sequencing and assembly of the human genome, and they are indicated as “Celera” SNP source in Tables 1-2. Furthermore, the information provided in Table 1-2, particularly the allele frequency information obtained from 39 individuals and the identification of the precise position of each SNP within each gene/transcript, allows haplotypes (i.e., groups of SNPs that are co-inherited) to be readily inferred. The present invention encompasses SNP haplotypes, as well as individual SNPs.

[0101] Thus, the present invention provides individual SNPs associated with myocardial infarction, as well as combinations of SNPs and haplotypes in genetic regions associated with myocardial infarction, polymorphic/variant transcript sequences (SEQ ID NOS:1-29) and genomic sequences (SEQ ID NOS:91-99) containing SNPs, encoded amino acid sequences (SEQ ID NOS: 30-58), and both transcript-based SNP context sequences (SEQ ID NOS: 59-90) and genomic-based SNP context sequences (SEQ ID NOS:100-109) (transcript sequences, protein sequences, and transcript-based SNP context sequences are provided in Table 1 and the Sequence Listing; genomic sequences and genomic-based SNP context sequences are provided in Table 2 and the Sequence Listing), methods of detecting these polymorphisms in a test sample, methods of determining the risk of an individual of having or developing myocardial infarction, methods of screening for compounds useful for treating disorders associated with a variant gene/protein such as myocardial infarction, compounds identified by these screening methods, methods of using the disclosed SNPs to select a treatment strategy, methods of treating a disorder associated with a variant gene/protein (i.e., therapeutic methods), and methods of using the SNPs of the present invention for human identification.

[0102] The present invention provides novel SNPs associated with myocardial infarction, as well as SNPs that were previously known in the art, but were not previously known to be associated with myocardial infarction. Accordingly, the present invention provides novel compositions and methods based on the novel SNPs disclosed herein, and also provides novel methods of using the known, but previously unassociated, SNPs in methods relating to myocardial infarction (e.g., for diagnosing myocardial infarction, etc.). In Tables 1-2, known SNPs are identified based on the public database in which they have been observed, which is indicated as one or more of the following SNP types: “dbSNP”=SNP observed in dbSNP, “HGBASE”=SNP observed in HGBASE, and “HGMD”=SNP observed in the Human Gene Mutation Database (HGMD). Novel SNPs for which the SNP source is only “Applera” and none other, i.e., those that have not been observed in any public databases and which were also not observed during shotgun sequencing and assembly of the Celera human genome sequence (i.e., “Celera” SNP source), are indicated in Tables 3-4.

[0103] Particular SNP alleles of the present invention can be associated with either an increased risk of having or developing myocardial infarction, or a decreased risk of having or developing myocardial infarction. SNP alleles that are associated with a decreased risk of having or developing myocardial infarction may be referred to as “protective” alleles, and SNP alleles that are associated with an increased risk of having or developing myocardial infarction may be referred to as “susceptibility” alleles or “risk factors”. Thus, whereas certain SNPs (or their encoded products) can be assayed to determine whether an individual possesses a SNP allele that is indicative of an increased risk of having or developing myocardial infarction (i.e., a susceptibility allele), other SNPs (or their encoded products) can be assayed to determine whether an individual possesses a SNP allele that is indicative of a decreased risk of having or developing myocardial infarction (i.e., a protective allele). Similarly, particular SNP alleles of the present invention can be associated with either an increased or decreased likelihood of responding to a particular treatment or therapeutic compound, or an increased or decreased likelihood of experiencing toxic effects from a particular treatment or therapeutic compound. The term “altered” may be used herein to encompass either of these two possibilities (e.g., an increased or a decreased risk/likelihood).

[0104] Those skilled in the art will readily recognize that nucleic acid molecules may be double-stranded molecules and that reference to a particular site on one strand refers, as well, to the corresponding site on a complementary strand. In defining a SNP position, SNP allele, or nucleotide sequence, reference to an adenine, a thymine (uridine), a cytosine, or a guanine at a particular site on one strand of a nucleic acid molecule also defines the thymine (uridine), adenine, guanine, or cytosine (respectively) at the corresponding site on a complementary strand of the nucleic acid molecule. Thus, reference may be made to either strand in order to refer to a particular SNP position, SNP allele, or nucleotide sequence. Probes and primers, may be designed to hybridize to either strand and SNP genotyping methods disclosed herein may generally target either strand. Throughout the specification, in identifying a SNP position, reference is generally made to the protein-encoding strand, only for the purpose of convenience.

[0105] References to variant peptides, polypeptides, or proteins of the present invention include peptides, polypeptides, proteins, or fragments thereof, that contain at least one amino acid residue that differs from the corresponding amino acid sequence of the art-known peptide/polypeptide/protein (the art-known protein may be interchangeably referred to as the “wild-type”, “reference”, or “normal” protein). Such variant peptides/polypeptides/proteins can result from a codon change caused by a nonsynonymous nucleotide substitution at a protein-coding SNP position (i.e., a missense mutation) disclosed by the present invention. Variant peptides/polypeptides/proteins of the present invention can also result from a nonsense mutation, i.e. a SNP that creates a premature stop codon, a SNP that generates a read-through mutation by abolishing a stop codon, or due to any SNP disclosed by the present invention that otherwise alters the structure, function/activity, or expression of a protein, such as a SNP in a regulatory region (e.g. a promoter or enhancer) or a SNP that leads to alternative or defective splicing, such as a SNP in an intron or a SNP at an exon/intron boundary. As used herein, the terms “polypeptide”, “peptide”, and “protein” are used interchangeably.

### Isolated Nucleic Acid Molecules and SNP Detection Reagents & Kits

[0106] Tables 1 and 2 provide a variety of information about each SNP of the present invention that is associated with myocardial infarction, including the transcript sequences (SEQ ID NOS:1-29), genomic sequences (SEQ ID NOS:91-99), and protein sequences (SEQ ID NOS:30-58) of the encoded gene products (with the SNPs indicated by IUB codes in the nucleic acid sequences). In addition, Tables 1 and 2 include SNP context sequences, which generally include 100 nucleotide upstream (5′) plus 100 nucleotides downstream (3′) of each SNP position (SEQ ID NOS:59-90 correspond to transcript-based SNP context sequences disclosed in Table 1, and SEQ ID NOS:100-109 correspond to genomic-based context sequences disclosed in Table 2), the alternative nucleotides (alleles) at each SNP position, and additional information about the variant where relevant, such as SNP type (coding, missense, splice site, UTR, etc.), human populations in which the SNP was observed, observed allele frequencies, information about the encoded protein, etc.

[0107] Isolated Nucleic Acid Molecules

[0108] The present invention provides isolated nucleic acid molecules that contain one or more SNPs disclosed Table 1 and/or Table 2. Preferred isolated nucleic acid molecules contain one or more SNPs identified in Table 3 and/or Table 4. Isolated nucleic acid molecules containing one or more SNPs disclosed in at least one of Tables 1-4 may be interchangeably referred to throughout the present text as “SNP-containing nucleic acid molecules”. Isolated nucleic acid molecules may optionally encode a full-length variant protein or fragment thereof. The isolated nucleic acid molecules of the present invention also include probes and primers (which are described in greater detail below in the section entitled “SNP Detection Reagents”), which may be used for assaying the disclosed SNPs, and isolated full-length genes, transcripts, cDNA molecules, and fragments thereof, which may be used for such purposes as expressing an encoded protein.

[0109] As used herein, an “isolated nucleic acid molecule” generally is one that contains a SNP of the present invention or one that hybridizes to such molecule such as a nucleic acid with a complementary sequence, and is separated from most other nucleic acids present in the natural source of the nucleic acid molecule. Moreover, an “isolated” nucleic acid molecule, such as a cDNA molecule containing a SNP of the present invention, can be substantially free of other cellular material, or culture medium when produced by recombinant techniques, or chemical precursors or other chemicals when chemically synthesized. A nucleic acid molecule can be fused to other coding or regulatory sequences and still be considered “isolated”. Nucleic acid molecules present in non-human transgenic animals, which do not naturally occur in the animal, are also considered “isolated”. For example, recombinant DNA molecules contained in a vector are considered “isolated”. Further examples of “isolated” DNA molecules include recombinant DNA molecules maintained in heterologous host cells, and purified (partially or substantially) DNA molecules in solution. Isolated RNA molecules include in vivo or in vitro RNA transcripts of the isolated SNP-containing DNA molecules of the present invention. Isolated nucleic acid molecules according to the present invention further include such molecules produced synthetically.

[0110] Generally, an isolated SNP-containing nucleic acid molecule comprises one or more SNP positions disclosed by the present invention with flanking nucleotide sequences on either side of the SNP positions. A flanking sequence can include nucleotide residues that are naturally associated with the SNP site and/or heterologous nucleotide sequences. Preferably the flanking sequence is up to about 500, 300, 100, 60, 50, 30, 25, 20, 15, 10, 8, or 4 nucleotides (or any other length in-between) on either side of a SNP position, or as long as the full-length gene or entire protein-coding sequence (or any portion thereof such as an exon), especially if the SNP-containing nucleic acid molecule is to be used to produce a protein or protein fragment.

[0111] For full-length genes and entire protein-coding sequences, a SNP flanking sequence can be, for example, up to about 5 KB, 4 KB, 3 KB, 2 KB, 1 KB on either side of the SNP. Furthermore, in such instances, the isolated nucleic acid molecule comprises exonic sequences (including protein-coding and/or non-coding exonic sequences), but may also include intronic sequences. Thus, any protein coding sequence may be either contiguous or separated by introns. The important point is that the nucleic acid is isolated from remote and unimportant flanking sequences and is of appropriate length such that it can be subjected to the specific manipulations or uses described herein such as recombinant protein expression, preparation of probes and primers for assaying the SNP position, and other uses specific to the SNP-containing nucleic acid sequences.

[0112] An isolated SNP-containing nucleic acid molecule can comprise, for example, a full-length gene or transcript, such as a gene isolated from genomic DNA (e.g., by cloning or PCR amplification), a cDNA molecule, or an mRNA transcript molecule. Polymorphic transcript sequences are provided in Table 1 and in the Sequence Listing (SEQ ID NOS: 1-29), and polymorphic genomic sequences are provided in Table 2 and in the Sequence Listing (SEQ ID NOS:91-99). Furthermore, fragments of such full-length genes and transcripts that contain one or more SNPs disclosed herein are also encompassed by the present invention, and such fragments may be used, for example, to express any part of a protein, such as a particular functional domain or an antigenic epitope.

[0113] Thus, the present invention also encompasses fragments of the nucleic acid sequences provided in Tables 1-2 (transcript sequences are provided in Table 1 as SEQ ID NOS:1-29, genomic sequences are provided in Table 2 as SEQ ID NOS:91-99, transcript-based SNP context sequences are provided in Table 1 as SEQ ID NO:59-90, and genomic-based SNP context sequences are provided in Table 2 as SEQ ID NO:100-109) and their complements. A fragment typically comprises a contiguous nucleotide sequence at least about 8 or more nucleotides, more preferably at least about 12 or more nucleotides, and even more preferably at least about 16 or more nucleotides. Further, a fragment could comprise at least about 18, 20, 22, 25, 30, 40, 50, 60, 80, 100, 150, 200, 250 or 500 (or any other number in-between) nucleotides in length. The length of the fragment will be based on its intended use. For example, the fragment can encode epitope-bearing regions of a variant peptide or regions of a variant peptide that differ from the normal/wild-type protein, or can be useful as a polynucleotide probe or primer. Such fragments can be isolated using the nucleotide sequences provided in Table 1 and/or Table 2 for the synthesis of a polynucleotide probe. A labeled probe can then be used, for example, to screen a cDNA library, genomic DNA library, or mRNA to isolate nucleic acid corresponding to the coding region. Further, primers can be used in amplification reactions, such as for purposes of assaying one or more SNPs sites or for cloning specific regions of a gene.

[0114] An isolated nucleic acid molecule of the present invention further encompasses a SNP-containing polynucleotide that is the product of any one of a variety of nucleic acid amplification methods, which are used to increase the copy numbers of a polynucleotide of interest in a nucleic acid sample. Such amplification methods are well known in the art, and they include but are not limited to, polymerase chain reaction (PCR) (U.S. Pat. Nos. 4,683,195; and 4,683,202; PCR Technology: Principles and Applications for DNA Amplification, ed. H. A. Erlich, Freeman Press, NY, N.Y., 1992), ligase chain reaction (LCR) (Wu and Wallace, Genomics 4:560, 1989; Landegren et al., Science 241:1077, 1988), strand displacement amplification (SDA) (U.S. Pat. Nos. 5,270,184; and 5,422,252), transcription-mediated amplification (TMA) (U.S. Pat. No. 5,399,491), linked linear amplification (LLA) (U.S. Pat. No. 6,027,923), and the like, and isothermal amplification methods such as nucleic acid sequence based amplification (NASBA), and self-sustained sequence replication (Guatelli et al., Proc. Natl. Acad. Sci. USA 87: 1874, 1990). Based on such methodologies, a person skilled in the art can readily design primers in any suitable regions 5′ and 3′ to a SNP disclosed herein. Such primers may be used to amplify DNA of any length so long that it contains the SNP of interest in its sequence.

[0115] As used herein, an “amplified polynucleotide” of the invention is a SNP-containing nucleic acid molecule whose amount has been increased at least two fold by any nucleic acid amplification method performed in vitro as compared to its starting amount in a test sample. In other preferred embodiments, an amplified polynucleotide is the result of at least ten fold, fifty fold, one hundred fold, one thousand fold, or even ten thousand fold increase as compared to its starting amount in a test sample. In a typical PCR amplification, a polynucleotide of interest is often amplified at least fifty thousand fold in amount over the unamplified genomic DNA, but the precise amount of amplification needed for an assay depends on the sensitivity of the subsequent detection method used.

[0116] Generally, an amplified polynucleotide is at least about 16 nucleotides in length. More typically, an amplified polynucleotide is at least about 20 nucleotides in length. In a preferred embodiment of the invention, an amplified polynucleotide is at least about 30 nucleotides in length. In a more preferred embodiment of the invention, an amplified polynucleotide is at least about 32, 40, 45, 50, or 60 nucleotides in length. In yet another preferred embodiment of the invention, an amplified polynucleotide is at least about 100, 200, 300, 400, or 500 nucleotides in length. While the total length of an amplified polynucleotide of the invention can be as long as an exon, an intron or the entire gene where the SNP of interest resides, an amplified product is typically up to about 1,000 nucleotides in length (although certain amplification methods may generate amplified products greater than 1000 nucleotides in length). More preferably, an amplified polynucleotide is not greater than about 600-700 nucleotides in length. It is understood that irrespective of the length of an amplified polynucleotide, a SNP of interest may be located anywhere along its sequence.

[0117] In a specific embodiment of the invention, the amplified product is at least about 201 nucleotides in length, comprises one of the transcript-based context sequences or the genomic-based context sequences shown in Tables 1-2. Such a product may have additional sequences on its 5′ end or 3′ end or both. In another embodiment, the amplified product is about 101 nucleotides in length, and it contains a SNP disclosed herein. Preferably, the SNP is located at the middle of the amplified product (e.g., at position 101 in an amplified product that is 201 nucleotides in length, or at position 51 in an amplified product that is 101 nucleotides in length), or within 1, 2, 3, 4, 5, 6, 7, 8, 9, 10, 12, 15, or 20 nucleotides from the middle of the amplified product (however, as indicated above, the SNP of interest may be located anywhere along the length of the amplified product).

[0118] The present invention provides isolated nucleic acid molecules that comprise, consist of, or consist essentially of one or more polynucleotide sequences that contain one or more SNPs disclosed herein, complements thereof, and SNP-containing fragments thereof

[0119] Accordingly, the present invention provides nucleic acid molecules that consist of any of the nucleotide sequences shown in Table 1 and/or Table 2 (transcript sequences are provided in Table 1 as SEQ ID NOS:1-29, genomic sequences are provided in Table 2 as SEQ ID NOS:91-99, transcript-based SNP context sequences are provided in Table 1 as SEQ ID NO:59-90, and genomic-based SNP context sequences are provided in Table 2 as SEQ ID NO:100-109), or any nucleic acid molecule that encodes any of the variant proteins provided in Table 1 (SEQ ID NOS:30-58). A nucleic acid molecule consists of a nucleotide sequence when the nucleotide sequence is the complete nucleotide sequence of the nucleic acid molecule.

[0120] The present invention further provides nucleic acid molecules that consist essentially of any of 20 the nucleotide sequences shown in Table 1 and/or Table 2 (transcript sequences are provided in Table 1 as SEQ ID NOS:1-29, genomic sequences are provided in Table 2 as SEQ ID NOS:91-99, transcript-based SNP context sequences are provided in Table 1 as SEQ ID NO:59-90, and genomic-based SNP context sequences are provided in Table 2 as SEQ ID NO:100-109), or any nucleic acid molecule that encodes any of the variant proteins provided in Table 1 (SEQ ID NOS:30-58). A nucleic acid molecule consists essentially of a nucleotide sequence when such a nucleotide sequence is present with only a few additional nucleotide residues in the final nucleic acid molecule.

[0121] The present invention further provides nucleic acid molecules that comprise any of the nucleotide sequences shown in Table 1 and/or Table 2 or a SNP-containing fragment thereof (transcript sequences are provided in Table 1 as SEQ ID NOS:1-29, genomic sequences are provided in Table 2 as SEQ ID NOS:91-99, transcript-based SNP context sequences are provided in Table 1 as SEQ ID NO:59-90, and genomic-based SNP context sequences are provided in Table 2 as SEQ ID NO:100-109), or any nucleic acid molecule that encodes any of the variant proteins provided in Table 1 (SEQ ID NOS:30-58). A nucleic acid molecule comprises a nucleotide sequence when the nucleotide sequence is at least part of the final nucleotide sequence of the nucleic acid molecule. In such a fashion, the nucleic acid molecule can be only the nucleotide sequence or have additional nucleotide residues, such as residues that are naturally associated with it or heterologous nucleotide sequences. Such a nucleic acid molecule can have one to a few additional nucleotides or can comprise many more additional nucleotides. A brief description of how various types of these nucleic acid molecules can be readily made and isolated is provided below, and such techniques are well known to those of ordinary skill in the art (Sambrook and Russell, 2000, Molecular Cloning: A Laboratory Manual, Cold Spring Harbor Press, NY).

[0122] The isolated nucleic acid molecules can encode mature proteins plus additional amino or carboxyl-terminal amino acids or both, or amino acids interior to the mature peptide (when the mature form has more than one peptide chain, for instance). Such sequences may play a role in processing of a protein from precursor to a mature form, facilitate protein trafficking, prolong or shorten protein half-life, or facilitate manipulation of a protein for assay or production. As generally is the case in situ, the additional amino acids may be processed away from the mature protein by cellular enzymes.

[0123] Thus, the isolated nucleic acid molecules include, but are not limited to, nucleic acid molecules having a sequence encoding a peptide alone, a sequence encoding a mature peptide and additional coding sequences such as a leader or secretory sequence (e.g., a pre-pro or pro-protein sequence), a sequence encoding a mature peptide with or without additional coding sequences, plus additional non-coding sequences, for example introns and non-coding 5′ and 3′ sequences such as transcribed but untranslated sequences that play a role in, for example, transcription, mRNA processing (including splicing and polyadenylation signals), ribosome binding, and/or stability of mRNA. In addition, the nucleic acid molecules may be fused to heterologous marker sequences encoding, for example, a peptide that facilitates purification.

[0124] Isolated nucleic acid molecules can be in the form of RNA, such as mRNA, or in the form DNA, including cDNA and genomic DNA, which may be obtained, for example, by molecular cloning or produced by chemical synthetic techniques or by a combination thereof (Sambrook and Russell, 2000, Molecular Cloning: A Laboratory Manual, Cold Spring Harbor Press, NY). Furthermore, isolated nucleic acid molecules, particularly SNP detection reagents such as probes and primers, can also be partially or completely in the form of one or more types of nucleic acid analogs, such as peptide nucleic acid (PNA) (U.S. Pat. Nos. 5,539,082; 5,527,675; 5,623,049; 5,714,331). The nucleic acid, especially DNA, can be double-stranded or single-stranded. Single-stranded nucleic acid can be the coding strand (sense strand) or the complementary non-coding strand (anti-sense strand). DNA, RNA, or PNA segments can be assembled, for example, from fragments of the human genome (in the case of DNA or RNA) or single nucleotides, short oligonucleotide linkers, or from a series of oligonucleotides, to provide a synthetic nucleic acid molecule. Nucleic acid molecules can be readily synthesized using the sequences provided herein as a reference; oligonucleotide and PNA oligomer synthesis techniques are well known in the art (see, e.g., Corey, “Peptide nucleic acids: expanding the scope of nucleic acid recognition”, Trends Biotechnol. June 1997;15(6):224-9, and Hyrup et al., “Peptide nucleic acids (PNA): synthesis, properties and potential applications”, Bioorg Med Chem. January 1996;4(1):5-23). Furthermore, large-scale automated oligonucleotide/PNA synthesis (including synthesis on an array or bead surface or other solid support) can readily be accomplished using commercially available nucleic acid synthesizers, such as the Applied Biosystems (Foster City, Calif.) 3900 High-Throughput DNA Synthesizer or Expedite 8909 Nucleic Acid Synthesis System, and the sequence information provided herein.

[0125] The present invention encompasses nucleic acid analogs that contain modified, synthetic, or non-naturally occurring nucleotides or structural elements or other alternative/modified nucleic acid chemistries known in the art. Such nucleic acid analogs are useful, for example, as detection reagents (e.g., primers/probes) for detecting one or more SNPs identified in Table 1 and/or Table 2. Furthermore, kits/systems (such as beads, arrays, etc.) that include these analogs are also encompassed by the present invention. For example, PNA oligomers that are based on the polymorphic sequences of the present invention are specifically contemplated. PNA oligomers are analogs of DNA in which the phosphate backbone is replaced with a peptide-like backbone (Lagriffoul et al., Bioorganic & Medicinal Chemistry Letters, 4: 1081-1082 (1994), Petersen et al., Bioorganic & Medicinal Chemistry Letters, 6: 793-796 (1996), Kumar et al., Organic Letters 3(9): 1269-1272 (2001), WO96/04000). PNA hybridizes to complementary RNA or DNA with higher affinity and specificity than conventional oligonucleotides and oligonucleotide analogs. The properties of PNA enable novel molecular biology and biochemistry applications unachievable with traditional oligonucleotides and peptides.

[0126] Additional examples of nucleic acid modifications that improve the binding properties and/or stability of a nucleic acid include the use of base analogs such as inosine, intercalators (U.S. Pat. No. 4,835,263) and the minor groove binders (U.S. Pat. No. 5,801,115). Thus, references herein to nucleic acid molecules, SNP-containing nucleic acid molecules, SNP detection reagents (e.g., probes and primers), oligonucleotides/polynucleotides include PNA oligomers and other nucleic acid analogs. Other examples of nucleic acid analogs and alternative/modified nucleic acid chemistries known in the art are described in Current Protocols in Nucleic Acid Chemistry, John Wiley & Sons, N.Y. (2002).

[0127] The present invention further provides nucleic acid molecules that encode fragments of the variant polypeptides disclosed herein as well as nucleic acid molecules that encode obvious variants of such variant polypeptides. Such nucleic acid molecules may be naturally occurring, such as paralogs (different locus) and orthologs (different organism), or may be constructed by recombinant DNA methods or by chemical synthesis. Non-naturally occurring variants may be made by mutagenesis techniques, including those applied to nucleic acid molecules, cells, or organisms. Accordingly, the variants can contain nucleotide substitutions, deletions, inversions and insertions (in addition to the SNPs disclosed in Tables 1-2). Variation can occur in either or both the coding and non-coding regions. The variations can produce conservative and/or non-conservative amino acid substitutions.

[0128] Further variants of the nucleic acid molecules disclosed in Tables 1-2, such as naturally occurring allelic variants (as well as orthologs and paralogs) and synthetic variants produced by mutagenesis techniques, can be identified and/or produced using methods well known in the art. Such further variants can comprise a nucleotide sequence that shares at least 70-80%, 80-85%, 85-90%, 91%, 92%, 93%, 94%, 95%, 96%, 97%, 98%, or 99% sequence identity with a nucleic acid sequence disclosed in Table 1 and/or Table 2 (or a fragment thereof) and that includes a novel SNP allele disclosed in Table 1 and/or Table 2. Further, variants can comprise a nucleotide sequence that encodes apolypeptide that shares at least 70-80%, 80-85%, 85-90%, 91%, 92%, 93%, 94%, 95%, 96%, 97%, 98%, or 99% sequence identity with a polypeptide sequence disclosed in Table 1 (or a fragment thereof) and that includes a novel SNP allele disclosed in Table 1 and/or Table 2. Thus, an aspect of the present invention that is specifically contemplated are isolated nucleic acid molecules that have a certain degree of sequence variation compared with the sequences shown in Tables 1-2, but that contain a novel SNP allele disclosed herein. In other words, as long as an isolated nucleic acid molecule contains a novel SNP allele disclosed herein, other portions of the nucleic acid molecule that flank the novel SNP allele can vary to some degree from the specific transcript, genomic, and context sequences shown in Tables 1-2, and can encode a polypeptide that varies to some degree from the specific polypeptide sequences shown in Table 1.

[0129] To determine the percent identity of two amino acid sequences or two nucleotide sequences of two molecules that share sequence homology, the sequences are aligned for optimal comparison purposes (e.g., gaps can be introduced in one or both of a first and a second amino acid or nucleic acid sequence for optimal alignment and non-homologous sequences can be disregarded for comparison purposes). In a preferred embodiment, at least 30%, 40%, 50%, 60%, 70%, 80%, or 90% or more of the length of a reference sequence is aligned for comparison purposes. The amino acid residues or nucleotides at corresponding amino acid positions or nucleotide positions are then compared. When a position in the first sequence is occupied by the same amino acid residue or nucleotide as the corresponding position in the second sequence, then the molecules are identical at that position (as used herein, amino acid or nucleic acid “identity” is equivalent to amino acid or nucleic acid “homology”). The percent identity between the two sequences is a function of the number of identical positions shared by the sequences, taking into account the number of gaps, and the length of each gap, which need to be introduced for optimal alignment of the two sequences.

[0130] The comparison of sequences and determination of percent identity between two sequences can be accomplished using a mathematical algorithm. (Computational Molecular Biology, Lesk, A. M., ed., Oxford University Press, New York, 1988; Biocomputing: Informatics and Genome Projects, Smith, D. W., ed., Academic Press, New York, 1993; Computer Analysis of Sequence Data, Part 1, Griffin, A. M., and Griffin, H. G., eds., Humana Press, New Jersey, 1994; Sequence Analysis in Molecular Biology, von Heinje, G., Academic Press, 1987; and Sequence Analysis Primer, Gribskov, M. and Devereux, J., eds., M Stockton Press, New York, 1991). In a preferred embodiment, the percent identity between two amino acid sequences is determined using the Needleman and Wunsch algorithm (J. Mol. Biol. (48):444-453 (1970)) which has been incorporated into the GAP program in the GCG software package, using either a Blossom 62 matrix or a PAM250 matrix, and a gap weight of 16, 14, 12, 10, 8, 6, or 4 and a length weight of 1, 2, 3, 4, 5, or 6.

[0131] In yet another preferred embodiment, the percent identity between two nucleotide sequences is determined using the GAP program in the GCG software package (Devereux, J., et al., Nucleic Acids Res. 12(1):387 (1984)), using a NWSgapdna.CMP matrix and a gap weight of 40, 50, 60, 70, or 80 and a length weight of 1, 2, 3, 4, 5, or 6. In another embodiment, the percent identity between two amino acid or nucleotide sequences is determined using the algorithm of E. Myers and W. Miller (CABIOS, 4:11-17 (1989)) which has been incorporated into the ALIGN program (version 2.0), using a PAM120 weight residue table, a gap length penalty of 12, and a gap penalty of 4.

[0132] The nucleotide and amino acid sequences of the present invention can further be used as a “query sequence” to perform a search against sequence databases to, for example, identify other family members or related sequences. Such searches can be performed using the NBLAST and XBLAST programs (version 2.0) of Altschul, et al. (J. Mol. Biol. 215:403-10 (1990)). BLAST nucleotide searches can be performed with the NBLAST program, score=100, wordlength=12 to obtain nucleotide sequences homologous to the nucleic acid molecules of the invention. BLAST protein searches can be performed with the XBLAST program, score=50, wordlength=3 to obtain amino acid sequences homologous to the proteins of the invention. To obtain gapped alignments for comparison purposes, Gapped BLAST can be utilized as described in Altschul et al. (Nucleic Acids Res. 25(17):3389-3402 (1997)). When utilizing BLAST and gapped BLAST programs, the default parameters of the respective programs (e.g., XBLAST and NBLAST) can be used. In addition to BLAST, examples of other search and sequence comparison programs used in the art include, but are not limited to, FASTA (Pearson, Methods Mol. Biol. 25, 365-389 (1994)) and KERR (Dufresne et al., Nat Biotechnol December 2002;20(12):1269-71). For further information regarding bioinformatics techniques, see Current Protocols in Bioinformatics, John Wiley & Sons, Inc., N.Y.

[0133] The present invention further provides non-coding fragments of the nucleic acid molecules disclosed in Table 1 and/or Table 2. Preferred non-coding fragments include, but are not limited to, promoter sequences, enhancer sequences, intronic sequences, 5′ untranslated regions (UTRs), 3′ untranslated regions, gene modulating sequences and gene termination sequences. Such fragments are useful, for example, in controlling heterologous gene expression and in developing screens to identify gene-modulating agents.

[0134] SNP Detection Reagents

[0135] In a specific aspect of the present invention, the SNPs disclosed in Table 1 and/or Table 2, and their associated transcript sequences (provided in Table 1 as SEQ ID NOS:1-29), genomic sequences (provided in Table 2 as SEQ ID NOS:91-99), and context sequences (transcript-based context sequences are provided in Table 1 as SEQ ID NOS:59-90; genomic-based context sequences are provided in Table 2 as SEQ ID NOS:100-109), can be used for the design of SNP detection reagents. As used herein, a “SNP detection reagent” is a reagent that specifically detects a specific target SNP position disclosed herein, and that is preferably specific for a particular nucleotide (allele) of the target SNP position (i.e., the detection reagent preferably can differentiate between different alternative nucleotides at a target SNP position, thereby allowing the identity of the nucleotide present at the target SNP position to be determined). Typically, such detection reagent hybridizes to a target SNP-containing nucleic acid molecule by complementary base-pairing in a sequence specific manner, and discriminates the target variant sequence from other nucleic acid sequences such as an art-known form in a test sample. An example of a detection reagent is a probe that hybridizes to a target nucleic acid containing one or more of the SNPs provided in Table 1 and/or Table 2. In a preferred embodiment, such a probe can differentiate between nucleic acids having a particular nucleotide (allele) at a target SNP position from other nucleic acids that have a different nucleotide at the same target SNP position. In addition, a detection reagent may hybridize to a specific region 5′ and/or 3′ to a SNP position, particularly a region corresponding to the context sequences provided in Table 1 and/or Table 2 (transcript-based context sequences are provided in Table 1 as SEQ ID NOS:59-90; genomic-based context sequences are provided in Table 2 as SEQ ID NOS:100-109). Another example of a detection reagent is a primer which acts as an initiation point of nucleotide extension along a complementary strand of a target polynucleotide. The SNP sequence information provided herein is also useful for designing primers, e.g. allele-specific primers, to amplify (e.g., using PCR) any SNP of the present invention.

[0136] In one preferred embodiment of the invention, a SNP detection reagent is an isolated or synthetic DNA or RNA polynucleotide probe or primer or PNA oligomer, or a combination of DNA, RNA and/or PNA, that hybridizes to a segment of a target nucleic acid molecule containing a SNP identified in Table 1 and/or Table 2. A detection reagent in the form of a polynucleotide may optionally contain modified base analogs, intercalators or minor groove binders. Multiple detection reagents such as probes may be, for example, affixed to a solid support (e.g., arrays or beads) or supplied in solution (e.g., probe/primer sets for enzymatic reactions such as PCR, RT-PCR, TaqMan assays, or primer-extension reactions) to form a SNP detection kit.

[0137] A probe or primer typically is a substantially purified oligonucleotide or PNA oligomer. Such oligonucleotide typically comprises a region of complementary nucleotide sequence that hybridizes under stringent conditions to at least about 8, 10, 12, 16, 18, 20, 22, 25, 30, 40, 50, 55, 60, 65, 70, 80, 90, 100, 120 (or any other number in-between) or more consecutive nucleotides in a target nucleic acid molecule. Depending on the particular assay, the consecutive nucleotides can either include the target SNP position, or be a specific region in close enough proximity 5′ and/or 3′ to the SNP position to carry out the desired assay.

[0138] Other preferred primer and probe sequences can readily be determined using the transcript sequences (SEQ ID NOS:1-29), genomic sequences (SEQ ID NOS:91-99), and SNP context sequences (transcript-based context sequences are provided in Table 1 as SEQ ID NOS:59-90; genomic-based context sequences are provided in Table 2 as SEQ ID NOS:100-109) disclosed in the Sequence Listing and in Tables 1-2. It will be apparent to one of skill in the art that such primers and probes are directly useful as reagents for genotyping the SNPs of the present invention, and can be incorporated into any kit/system format.

[0139] In order to produce a probe or primer specific for a target SNP-containing sequence, the gene/transcript and/or context sequence surrounding the SNP of interest is typically examined using a computer algorithm which starts at the 5′ or at the 3′ end of the nucleotide sequence. Typical algorithms will then identify oligomers of defined length that are unique to the gene/SNP context sequence, have a GC content within a range suitable for hybridization, lack predicted secondary structure that may interfere with hybridization, and/or possess other desired characteristics or that lack other undesired characteristics.

[0140] A primer or probe of the present invention is typically at least about 8 nucleotides in length. In one embodiment of the invention, a primer or a probe is at least about 10 nucleotides in length. In a preferred embodiment, a primer or a probe is at least about 12 nucleotides in length. In a more preferred embodiment, a primer or probe is at least about 16, 17, 18, 19, 20, 21, 22, 23, 24 or 25 nucleotides in length. While the maximal length of a probe can be as long as the target sequence to be detected, depending on the type of assay in which it is employed, it is typically less than about 50, 60, 65, or 70 nucleotides in length. In the case of a primer, it is typically less than about 30 nucleotides in length. In a specific preferred embodiment of the invention, a primer or a probe is within the length of about 18 and about 28 nucleotides. However, in other embodiments, such as nucleic acid arrays and other embodiments in which probes are affixed to a substrate, the probes can be longer, such as on the order of 30-70, 75, 80, 90, 100, or more nucleotides in length (see the section below entitled “SNP Detection Kits and Systems”).

[0141] For analyzing SNPs, it may be appropriate to use oligonucleotides specific for alternative SNP alleles. Such oligonucleotides which detect single nucleotide variations in target sequences may be referred to by such terms as “allele-specific oligonucleotides”, “allele-specific probes”, or “allele-specific primers”. The design and use of allele-specific probes for analyzing polymorphisms is described in, e.g., Mutation Detection A Practical Approach, ed. Cotton et al. Oxford University Press, 1998; Saiki et al., Nature 324, 163-166 (1986); Dattagupta, EP235,726; and Saiki, WO 89/11548.

[0142] While the design of each allele-specific primer or probe depends on variables such as the precise composition of the nucleotide sequences flanking a SNP position in a target nucleic acid molecule, and the length of the primer or probe, another factor in the use of primers and probes is the stringency of the condition under which the hybridization between the probe or primer and the target sequence is performed. Higher stringency conditions utilize buffers with lower ionic strength and/or a higher reaction temperature, and tend to require a more perfect match between probe/primer and a target sequence in order to form a stable duplex. If the stringency is too high, however, hybridization may not occur at all. In contrast, lower stringency conditions utilize buffers with higher ionic strength and/or a lower reaction temperature, and permit the formation of stable duplexes with more mismatched bases between a probe/primer and a target sequence. By way of example and not limitation, exemplary conditions for high stringency hybridization conditions using an allele-specific probe are as follows: Prehybridization with a solution containing 5× standard saline phosphate EDTA (SSPE), 0.5% NaDodSO₄ (SDS) at 55° C., and incubating probe with target nucleic acid molecules in the same solution at the same temperature, followed by washing with a solution containing 2× SSPE, and 0.1% SDS at 55° C. or room temperature.

[0143] Moderate stringency hybridization conditions may be used for allele-specific primer extension reactions with a solution containing, e.g., about 50 mM KCl at about 46° C. Alternatively, the reaction may be carried out at an elevated temperature such as 60° C. In another embodiment, a moderately stringent hybridization condition suitable for oligonucleotide ligation assay (OLA) reactions wherein two probes are ligated if they are completely complementary to the target sequence may utilize a solution of about 100 mM KCl at a temperature of 46° C.

[0144] In a hybridization-based assay, allele-specific probes can be designed that hybridize to a segment of target DNA from one individual but do not hybridize to the corresponding segment from another individual due to the presence of different polymorphic forms (e.g., alternative SNP alleles/nucleotides) in the respective DNA segments from the two individuals. Hybridization conditions should be sufficiently stringent that there is a significant detectable difference in hybridization intensity between alleles, and preferably an essentially binary response, whereby a probe hybridizes to only one of the alleles or significantly more strongly to one allele. While a probe may be designed to hybridize to a target sequence that contains a SNP site such that the SNP site aligns anywhere along the sequence of the probe, the probe is preferably designed to hybridize to a segment of the target sequence such that the SNP site aligns with a central position of the probe (e.g., a position within the probe that is at least three nucleotides from either end of the probe). This design of probe generally achieves good discrimination in hybridization between different allelic forms.

[0145] In another embodiment, a probe or primer may be designed to hybridize to a segment of target DNA such that the SNP aligns with either the 5′ most end or the 3′ most end of the probe or primer. In a specific preferred embodiment which is particularly suitable for use in a oligonucleotide ligation assay (U.S. Pat. No. 4,988,617), the 3′ most nucleotide of the probe aligns with the SNP position in the target sequence.

[0146] Oligonucleotide probes and primers may be prepared by methods well known in the art. Chemical synthetic methods include, but are limited to, the phosphotriester method described by Narang et al., 1979, Methods in Enzymology 68:90; the phosphodiester method described by Brown et al., 1979, Methods in Enzymology 68:109, the diethylphosphoamidate method described by Beaucage et al., 1981, Tetrahedron Letters 22:1859; and the solid support method described in U.S. Pat. No. 4,458,066.

[0147] Allele-specific probes are often used in pairs (or, less commonly, in sets of 3 or 4, such as if a SNP position is known to have 3 or 4 alleles, respectively, or to assay both strands of a nucleic acid molecule for a target SNP allele), and such pairs may be identical except for a one nucleotide mismatch that represents the allelic variants at the SNP position. Commonly, one member of a pair perfectly matches a reference form of a target sequence that has a more common SNP allele (i.e., the allele that is more frequent in the target population) and the other member of the pair perfectly matches a form of the target sequence that has a less common SNP allele (i.e., the allele that is rarer in the target population). In the case of an array, multiple pairs of probes can be immobilized on the same support for simultaneous analysis of multiple different polymorphisms.

[0148] In one type of PCR-based assay, an allele-specific primer hybridizes to a region on a target nucleic acid molecule that overlaps a SNP position and only primes amplification of an allelic form to which the primer exhibits perfect complementarity (Gibbs, 1989, Nucleic Acid Res. 17 2427-2448). Typically, the primer's 3′-most nucleotide is aligned with and complementary to the SNP position of the target nucleic acid molecule. This primer is used in conjunction with a second primer that hybridizes at a distal site. Amplification proceeds from the two primers, producing a detectable product that indicates which allelic form is present in the test sample. A control is usually performed with a second pair of primers, one of which shows a single base mismatch at the polymorphic site and the other of which exhibits perfect complementarity to a distal site. The single-base mismatch prevents amplification or substantially reduces amplification efficiency, so that either no detectable product is formed or it is formed in lower amounts or at a slower pace. The method generally works most effectively when the mismatch is at the 3′-most position of the oligonucleotide (i.e., the 3′-most position of the oligonucleotide aligns with the target SNP position) because this position is most destabilizing to elongation from the primer (see, e.g., WO 93/22456). This PCR-based assay can be utilized as part of the TaqMan assay, described below.

[0149] In a specific embodiment of the invention, a primer of the invention contains a sequence substantially complementary to a segment of a target SNP-containing nucleic acid molecule except that the primer has a mismatched nucleotide in one of the three nucleotide positions at the 3′-most end of the primer, such that the mismatched nucleotide does not base pair with a particular allele at the SNP site. In a preferred embodiment, the mismatched nucleotide in the primer is the second from the last nucleotide at the 3′-most position of the primer. In a more preferred embodiment, the mismatched nucleotide in the primer is the last nucleotide at the 3′-most position of the primer.

[0150] In another embodiment of the invention, a SNP detection reagent of the invention is labeled with a fluorogenic reporter dye that emits a detectable signal. While the preferred reporter dye is a fluorescent dye, any reporter dye that can be attached to a detection reagent such as an oligonucleotide probe or primer is suitable for use in the invention. Such dyes include, but are not limited to, Acridine, AMCA, BODIPY, Cascade Blue, Cy2, Cy3, Cy5, Cy7, Dabcyl, Edans, Eosin, Erythrosin, Fluorescein, 6-Fam, Tet, Joe, Hex, Oregon Green, Rhodamine, Rhodol Green, Tamra, Rox, and Texas Red.

[0151] In yet another embodiment of the invention, the detection reagent may be further labeled with a quencher dye such as Tamra, especially when the reagent is used as a self-quenching probe such as a TaqMan (U.S. Pat. Nos. 5,210,015 and 5,538,848) or Molecular Beacon probe (U.S. Pat. Nos. 5,118,801 and 5,312,728), or other stemless or linear beacon probe (Livak et al., 1995, PCR Method Appl. 4:357-362; Tyagi et al., 1996, Nature Biotechnology 14: 303-308; Nazarenko et al., 1997, Nucl. Acids Res. 25:2516-2521; U.S. Pat. Nos. 5,866,336 and 6,117,635).

[0152] The detection reagents of the invention may also contain other labels, including but not limited to, biotin for streptavidin binding, hapten for antibody binding, and oligonucleotide for binding to another complementary oligonucleotide such as pairs of zipcodes.

[0153] The present invention also contemplates reagents that do not contain (or that are complementary to) a SNP nucleotide identified herein but that are used to assay one or more SNPs disclosed herein. For example, primers that flank, but do not hybridize directly to a target SNP position provided herein are useful in primer extension reactions in which the primers hybridize to a region adjacent to the target SNP position (i.e., within one or more nucleotides from the target SNP site). During the primer extension reaction, a primer is typically not able to extend past a target SNP site if a particular nucleotide (allele) is present at that target SNP site, and the primer extension product can be detected in order to determine which SNP allele is present at the target SNP site. For example, particular ddNTPs are typically used in the primer extension reaction to terminate primer extension once a ddNTP is incorporated into the extension product (a primer extension product which includes a ddNTP at the 3′-most end of the primer extension product, and in which the ddNTP is a nucleotide of a SNP disclosed herein, is a composition that is specifically contemplated by the present invention). Thus, reagents that bind to a nucleic acid molecule in a region adjacent to a SNP site and that are used for assaying the SNP site, even though the bound sequences do not necessarily include the SNP site itself, are also contemplated by the present invention.

[0154] SNP Detection Kits and Systems

[0155] A person skilled in the art will recognize that, based on the SNP and associated sequence information disclosed herein, detection reagents can be developed and used to assay any SNP of the present invention individually or in combination, and such detection reagents can be readily incorporated into one of the established kit or system formats which are well known in the art. The terms “kits” and “systems”, as used herein in the context of SNP detection reagents, are intended to refer to such things as combinations of multiple SNP detection reagents, or one or more SNP detection reagents in combination with one or more other types of elements or components (e.g., other types of biochemical reagents, containers, packages such as packaging intended for commercial sale, substrates to which SNP detection reagents are attached, electronic hardware components, etc.). Accordingly, the present invention further provides SNP detection kits and systems, including but not limited to, packaged probe and primer sets (e.g., TaqMan probe/primer sets), arrays/microarrays of nucleic acid molecules, and beads that contain one or more probes, primers, or other detection reagents for detecting one or more SNPs of the present invention. The kits/systems can optionally include various electronic hardware components; for example, arrays (“DNA chips”) and microfluidic systems (“lab-on-a-chip” systems) provided by various manufacturers typically comprise hardware components. Other kits/systems (e.g., probe/primer sets) may not include electronic hardware components, but may be comprised of, for example, one or more SNP detection reagents (along with, optionally, other biochemical reagents) packaged in one or more containers.

[0156] In some embodiments, a SNP detection kit typically contains one or more detection reagents and other components (e.g., a buffer, enzymes such as DNA polymerases or ligases, chain extension nucleotides such as deoxynucleotide triphosphates, and in the case of Sanger-type DNA sequencing reactions, chain terminating nucleotides, positive control sequences, negative control sequences, and the like) necessary to carry out an assay or reaction, such as amplification and/or detection of a SNP-containing nucleic acid molecule. A kit may further contain means for determining the amount of a target nucleic acid, and means for comparing the amount with a standard, and can comprise instructions for using the kit to detect the SNP-containing nucleic acid molecule of interest. In one embodiment of the present invention, kits are provided which contain the necessary reagents to carry out one or more assays to detect one or more SNPs disclosed herein. In a preferred embodiment of the present invention, SNP detection kits/systems are in the form of nucleic acid arrays, or compartmentalized kits, including microfluidic/lab-on-a-chip systems.

[0157] SNP detection kits/systems may contain, for example, one or more probes, or pairs of probes, that hybridize to a nucleic acid molecule at or near each target SNP position. Multiple pairs of allele-specific probes may be included in the kit/system to simultaneously assay large numbers of SNPs, at least one of which is a SNP of the present invention. In some kits/systems, the allele-specific probes are immobilized to a substrate such as an array or bead. For example, the same substrate can comprise allele-specific probes for detecting at least 1; 10; 100; 1000; 10,000; 100,000 (or any other number in-between) or substantially all of the SNPs shown in Table 1 and/or Table 2.

[0158] The terms “arrays”, “microarrays”, and “DNA chips” are used herein interchangeably to refer to an array of distinct polynucleotides affixed to a substrate, such as glass, plastic, paper, nylon or other type of membrane, filter, chip, or any other suitable solid support. The polynucleotides can be synthesized directly on the substrate, or synthesized separate from the substrate and then affixed to the substrate. In one embodiment, the microarray is prepared and used according to the methods described in U.S. Pat. No. 5,837,832, Chee et al., PCT application W095/11995 (Chee et al.), Lockhart, D. J. et al. (1996; Nat. Biotech. 14: 1675-1680) and Schena, M. et al. (1996; Proc. Natl. Acad. Sci. 93: 10614-10619), all of which are incorporated herein in their entirety by reference. In other embodiments, such arrays are produced by the methods described by Brown et al., U.S. Pat. No. 5,807,522.

[0159] Nucleic acid arrays are reviewed in the following references: Zammatteo et al., “New chips for molecular biology and diagnostics”, Biotechnol Annu Rev. 2002;8:85-101; Sosnowski et al., “Active microelectronic array system for DNA hybridization, genotyping and pharmacogenomic applications”, Psychiatr Genet. December 2002;12(4):181-92; Heller, “DNA microarray technology: devices, systems, and applications”, Annu Rev Biomed Eng. 2002;4:129-53. Epub Mar. 22, 2002; Kolchinsky et al., “Analysis of SNPs and other genomic variations using gel-based chips”, Hum Mutat. April 2002;19(4):343-60; and McGall et al., “High-density genechip oligonucleotide probe arrays”, Adv Biochem Eng Biotechnol. 2002;77:21-42.

[0160] Any number of probes, such as allele-specific probes, may be implemented in an array, and each probe or pair of probes can hybridize to a different SNP position. In the case of polynucleotide probes, they can be synthesized at designated areas (or synthesized separately and then affixed to designated areas) on a substrate using a light-directed chemical process. Each DNA chip can contain, for example, thousands to millions of individual synthetic polynucleotide probes arranged in a grid-like pattern and miniaturized (e.g., to the size of a dime). Preferably, probes are attached to a solid support in an ordered, addressable array.

[0161] A microarray can be composed of a large number of unique, single-stranded polynucleotides, usually either synthetic antisense polynucleotides or fragments of cDNAs, fixed to a solid support. Typical polynucleotides are preferably about 6-60 nucleotides in length, more preferably about 15-30 nucleotides in length, and most preferably about 18-25 nucleotides in length. For certain types of microarrays or other detection kits/systems, it may be preferable to use oligonucleotides that are only about 7-20 nucleotides in length. In other types of arrays, such as arrays used in conjunction with chemiluminescent detection technology, preferred probe lengths can be, for example, about 15-80 nucleotides in length, preferably about 50-70 nucleotides in length, more preferably about 55-65 nucleotides in length, and most preferably about 60 nucleotides in length. The microarray or detection kit can contain polynucleotides that cover the known 5′ or 3′ sequence of a gene/transcript or target SNP site, sequential polynucleotides that cover the full-length sequence of a gene/transcript; or unique polynucleotides selected from particular areas along the length of a target gene/transcript sequence, particularly areas corresponding to one or more SNPs disclosed in Table 1 and/or Table 2. Polynucleotides used in the microarray or detection kit can be specific to a SNP or SNPs of interest (e.g., specific to a particular SNP allele at a target SNP site, or specific to particular SNP alleles at multiple different SNP sites), or specific to a polymorphic gene/transcript or genes/transcripts of interest.

[0162] Hybridization assays based on polynucleotide arrays rely on the differences in hybridization stability of the probes to perfectly matched and mismatched target sequence variants. For SNP genotyping, it is generally preferable that stringency conditions used in hybridization assays are high enough such that nucleic acid molecules that differ from one another at as little as a single SNP position can be differentiated (e.g., typical SNP hybridization assays are designed so that hybridization will occur only if one particular nucleotide is present at a SNP position, but will not occur if an alternative nucleotide is present at that SNP position). Such high stringency conditions may be preferable when using, for example, nucleic acid arrays of allele-specific probes for SNP detection. Such high stringency conditions are described in the preceding section, and are well known to those skilled in the art and can be found in, for example, Current Protocols in Molecular Biology, John Wiley & Sons, N.Y. (1989), 6.3.1-6.3.6.

[0163] In other embodiments, the arrays are used in conjunction with chemiluminescent detection technology. The following patents and patent applications, which are all hereby incorporated by reference, provide additional information pertaining to chemiluminescent detection: U.S. patent application Ser. Nos. 10/620,332 and 10/620,333 describe chemiluminescent approaches for microarray detection; U.S. Pat. Nos. 6,124,478, 6,107,024, 5,994,073, 5,981,768, 5,871,938, 5,843,681, 5,800,999, and 5,773,628 describe methods and compositions of dioxetane for performing chemiluminescent detection; and U.S. published application US2002/0110828 discloses methods and compositions for microarray controls.

[0164] In one embodiment of the invention, a nucleic acid array can comprise an array of probes of about 15-25 nucleotides in length. In further embodiments, a nucleic acid array can comprise any number of probes, in which at least one probe is capable of detecting one or more SNPs disclosed in Table 1 and/or Table 2, and/or at least one probe comprises a fragment of one of the sequences selected from the group consisting of those disclosed in Table 1, Table 2, the Sequence Listing, and sequences complementary thereto, said fragment comprising at least about 8 consecutive nucleotides, preferably 10, 12, 15, 16, 18, 20, more preferably 22, 25, 30, 40, 47, 50, 55, 60, 65, 70, 80, 90, 100, or more consecutive nucleotides (or any other number in-between) and containing (or being complementary to) a novel SNP allele disclosed in Table 1 and/or Table 2. In some embodiments, the nucleotide complementary to the SNP site is within 5, 4, 3, 2, or 1 nucleotide from the center of the probe, more preferably at the center of said probe.

[0165] A polynucleotide probe can be synthesized on the surface of the substrate by using a chemical coupling procedure and an ink jet application apparatus, as described in PCT application W095/251116 (Baldeschweiler et al.) which is incorporated herein in its entirety by reference. In another aspect, a “gridded” array analogous to a dot (or slot) blot may be used to arrange and link cDNA fragments or oligonucleotides to the surface of a substrate using a vacuum system, thermal, UV, mechanical or chemical bonding procedures. An array, such as those described above, may be produced by hand or by using available devices (slot blot or dot blot apparatus), materials (any suitable solid support), and machines (including robotic instruments), and may contain 8, 24, 96, 384, 1536, 6144 or more polynucleotides, or any other number which lends itself to the efficient use of commercially available instrumentation.

[0166] Using such arrays or other kits/systems, the present invention provides methods of identifying the SNPs disclosed herein in a test sample. Such methods typically involve incubating a test sample of nucleic acids with an array comprising one or more probes corresponding to at least one SNP position of the present invention, and assaying for binding of a nucleic acid from the test sample with one or more of the probes. Conditions for incubating a SNP detection reagent (or a kit/system that employs one or more such SNP detection reagents) with a test sample vary. Incubation conditions depend on such factors as the format employed in the assay, the detection methods employed, and the type and nature of the detection reagents used in the assay. One skilled in the art will recognize that any one of the commonly available hybridization, amplification and array assay formats can readily be adapted to detect the SNPs disclosed herein.

[0167] A SNP detection kit/system of the present invention may include components that are used to prepare nucleic acids from a test sample for the subsequent amplification and/or detection of a SNP-containing nucleic acid molecule. Such sample preparation components can be used to produce nucleic acid extracts (including DNA and/or RNA), proteins or membrane extracts from any bodily fluids (such as blood, serum, plasma, urine, saliva, phlegm, gastric juices, semen, tears, sweat, etc.), skin, hair, cells (especially nucleated cells), biopsies, buccal swabs or tissue specimens. The test samples used in the above-described methods will vary based on such factors as the assay format, nature of the detection method, and the specific tissues, cells or extracts used as the test sample to be assayed. Methods of preparing nucleic acids, proteins, and cell extracts are well known in the art and can be readily adapted to obtain a sample that is compatible with the system utilized. Automated sample preparation systems for extracting nucleic acids from a test sample are commercially available, and examples are Qiagen's BioRobot 9600, Applied Biosystems' PRISM 6700, and Roche Molecular Systems' COBAS AmpliPrep System.

[0168] Another form of kit contemplated by the present invention is a compartmentalized kit. A compartmentalized kit includes any kit in which reagents are contained in separate containers. Such containers include, for example, small glass containers, plastic containers, strips of plastic, glass or paper, or arraying material such as silica. Such containers allow one to efficiently transfer reagents from one compartment to another compartment such that the test samples and reagents are not cross-contaminated, or from one container to another vessel not included in the kit, and the agents or solutions of each container can be added in a quantitative fashion from one compartment to another or to another vessel. Such containers may include, for example, one or more containers which will accept the test sample, one or more containers which contain at least one probe or other SNP detection reagent for detecting one or more SNPs of the present invention, one or more containers which contain wash reagents (such as phosphate buffered saline, Tris-buffers, etc.), and one or more containers which contain the reagents used to reveal the presence of the bound probe or other SNP detection reagents. The kit can optionally further comprise compartments and/or reagents for, for example, nucleic acid amplification or other enzymatic reactions such as primer extension reactions, hybridization, ligation, electrophoresis (preferably capillary electrophoresis), mass spectrometry, and/or laser-induced fluorescent detection. The kit may also include instructions for using the kit. Exemplary compartmentalized kits include microfluidic devices known in the art (see, e.g., Weigl et al., “Lab-on-a-chip for drug development”, Adv Drug Deliv Rev. Feb. 24, 2004;55(3):349-77). In such microfluidic devices, the containers may be referred to as, for example, microfluidic “compartments”, “chambers”, or “channels”.

[0169] Microfluidic devices, which may also be referred to as “lab-on-a-chip” systems, biomedical micro-electro-mechanical systems (bioMEMs), or multicomponent integrated systems, are exemplary kits/systems of the present invention for analyzing SNPs. Such systems miniaturize and compartmentalize processes such as probe/target hybridization, nucleic acid amplification, and capillary electrophoresis reactions in a single functional device. Such microfluidic devices typically utilize detection reagents in at least one aspect of the system, and such detection reagents may be used to detect one or more SNPs of the present invention. One example of a microfluidic system is disclosed in U.S. Pat. No. 5,589,136, which describes the integration of PCR amplification and capillary electrophoresis in chips. Exemplary microfluidic systems comprise a pattern of microchannels designed onto a glass, silicon, quartz, or plastic wafer included on a microchip. The movements of the samples may be controlled by electric, electroosmotic or hydrostatic forces applied across different areas of the microchip to create functional microscopic valves and pumps with no moving parts. Varying the voltage can be used as a means to control the liquid flow at intersections between the micro-machined channels and to change the liquid flow rate for pumping across different sections of the microchip. See, for example, U.S. Pat. No. 6,153,073, Dubrow et al., and U.S. Pat. No. 6,156,181, Parce et al.

[0170] For genotyping SNPs, an exemplary microfluidic system may integrate, for example, nucleic acid amplification, primer extension, capillary electrophoresis, and a detection method such as laser induced fluorescence detection. In a first step of an exemplary process for using such an exemplary system, nucleic acid samples are amplified, preferably by PCR. Then, the amplification products are subjected to automated primer extension reactions using ddNTPs (specific fluorescence for each ddNTP) and the appropriate oligonucleotide primers to carry out primer extension reactions which hybridize just upstream of the targeted SNP. Once the extension at the 3′ end is completed, the primers are separated from the unincorporated fluorescent ddNTPs by capillary electrophoresis. The separation medium used in capillary electrophoresis can be, for example, polyacrylamide, polyethyleneglycol or dextran. The incorporated ddNTPs in the single nucleotide primer extension products are identified by laser-induced fluorescence detection. Such an exemplary microchip can be used to process, for example, at least 96 to 384 samples, or more, in parallel.

[0171] Uses of Nucleic Acid Molecules

[0172] The nucleic acid molecules of the present invention have a variety of uses, especially in the diagnosis and treatment of myocardial infarction. For example, the nucleic acid molecules are useful as hybridization probes, such as for genotyping SNPs in messenger RNA, transcript, cDNA, genomic DNA, amplified DNA or other nucleic acid molecules, and for isolating full-length cDNA and genomic clones encoding the variant peptides disclosed in Table 1 as well as their orthologs.

[0173] A probe can hybridize to any nucleotide sequence along the entire length of a nucleic acid molecule provided in Table 1 and/or Table 2. Preferably, a probe of the present invention hybridizes to a region of a target sequence that encompasses a SNP position indicated in Table 1 and/or Table 2. More preferably, a probe hybridizes to a SNP-containing target sequence in a sequence-specific manner such that it distinguishes the target sequence from other nucleotide sequences which vary from the target sequence only by which nucleotide is present at the SNP site. Such a probe is particularly useful for detecting the presence of a SNP-containing nucleic acid in a test sample, or for determining which nucleotide (allele) is present at a particular SNP site (i.e., genotyping the SNP site).

[0174] A nucleic acid hybridization probe may be used for determining the presence, level, form, and/or distribution of nucleic acid expression. The nucleic acid whose level is determined can be DNA or RNA. Accordingly, probes specific for the SNPs described herein can be used to assess the presence, expression and/or gene copy number in a given cell, tissue, or organism. These uses are relevant for diagnosis of disorders involving an increase or decrease in gene expression relative to normal levels. In vitro techniques for detection of mRNA include, for example, Northern blot hybridizations and in situ hybridizations. In vitro techniques for detecting DNA include Southern blot hybridizations and in situ hybridizations (Sambrook and Russell, 2000, Molecular Cloning: A Laboratory Manual, Cold Spring Harbor Press, Cold Spring Harbor, N.Y.).

[0175] Probes can be used as part of a diagnostic test kit for identifying cells or tissues in which a variant protein is expressed, such as by measuring the level of a variant protein-encoding nucleic acid (e.g., mRNA) in a sample of cells from a subject or determining if a polynucleotide contains a SNP of interest.

[0176] Thus, the nucleic acid molecules of the invention can be used as hybridization probes to detect the SNPs disclosed herein, thereby determining whether an individual with the polymorphisms is at risk for myocardial infarction or has developed early stage myocardial infarction. Detection of a SNP associated with a disease phenotype provides a diagnostic tool for an active disease and/or genetic predisposition to the disease.

[0177] The nucleic acid molecules of the invention are also useful as primers to amplify any given region of a nucleic acid molecule, particularly a region containing a SNP identified in Table 1 and/or Table 2.

[0178] The nucleic acid molecules of the invention are also usefuil for constructing recombinant vectors (described in greater detail below). Such vectors include expression vectors that express a portion of, or all of, any of the variant peptide sequences provided in Table 1. Vectors also include insertion vectors, used to integrate into another nucleic acid molecule sequence, such as into the cellular genome, to alter in situ expression of a gene and/or gene product. For example, an endogenous coding sequence can be replaced via homologous recombination with all or part of the coding region containing one or more specifically introduced SNPs.

[0179] The nucleic acid molecules of the invention are also useful for expressing antigenic portions of the variant proteins, particularly antigenic portions that contain a variant amino acid sequence (e.g., an amino acid substitution) caused by a SNP disclosed in Table 1 and/or Table 2.

[0180] The nucleic acid molecules of the invention are also useful for constructing vectors containing a gene regulatory region of the nucleic acid molecules of the present invention.

[0181] The nucleic acid molecules of the invention are also useful for designing ribozymes corresponding to all, or a part, of an mRNA molecule expressed from a SNP-containing nucleic acid molecule described herein.

[0182] The nucleic acid molecules of the invention are also useful for constructing host cells expressing a part, or all, of the nucleic acid molecules and variant peptides.

[0183] The nucleic acid molecules of the invention are also useful for constructing transgenic animals expressing all, or a part, of the nucleic acid molecules and variant peptides. The production of recombinant cells and transgenic animals having nucleic acid molecules which contain the SNPs disclosed in Table 1 and/or Table 2 allow, for example, effective clinical design of treatment compounds and dosage regimens.

[0184] The nucleic acid molecules of the invention are also useful in assays for drug screening to identify compounds that, for example, modulate nucleic acid expression.

[0185] The nucleic acid molecules of the invention are also useful in gene therapy in patients whose cells have aberrant gene expression. Thus, recombinant cells, which include a patient's cells that have been engineered ex vivo and returned to the patient, can be introduced into an individual where the recombinant cells produce the desired protein to treat the individual.

[0186] SNP Genotvping Methods

[0187] The process of determining which specific nucleotide (i.e., allele) is present at each of one or more SNP positions, such as a SNP position in a nucleic acid molecule disclosed in Table 1 and/or Table 2, is referred to as SNP genotyping. The present invention provides methods of SNP genotyping, such as for use in screening for myocardial infarction or related pathologies, or determining predisposition thereto, or determining responsiveness to a form of treatment, or in genome mapping or SNP association analysis, etc.

[0188] Nucleic acid samples can be genotyped to determine which allele(s) is/are present at any given genetic region (e.g., SNP position) of interest by methods well known in the art. The neighboring sequence can be used to design SNP detection reagents such as oligonucleotide probes, which may optionally be implemented in a kit format. Exemplary SNP genotyping methods are described in Chen et al., “Single nucleotide polymorphism genotyping: biochemistry, protocol, cost and throughput”, Pharmacogenomics J. 2003;3(2):77-96; Kwok et al., “Detection of single nucleotide polymorphisms”, Curr Issues Mol Biol. April 2003;5(2):43-60; Shi, “Technologies for individual genotyping: detection of genetic polymorphisms in drug targets and disease genes”, Am J Pharmacogenomics. 2002;2(3):197-205; and Kwok, “Methods for genotyping single nucleotide polymorphisms”, Annu Rev Genomics Hum Genet 2001;2:235-58. Exemplary techniques for high-throughput SNP genotyping are described in Mamellos, “High-throughput SNP analysis for genetic association studies”, Curr Opin Drug Discov Devel. May 2003;6(3):317-21. Common SNP genotyping methods include, but are not limited to, TaqMan assays, molecular beacon assays, nucleic acid arrays, allele-specific primer extension, allele-specific PCR, arrayed primer extension, homogeneous primer extension assays, primer extension with detection by mass spectrometry, pyrosequencing, multiplex primer extension sorted on genetic arrays, ligation with rolling circle amplification, homogeneous ligation, OLA (U.S. Pat. No. 4,988,167), multiplex ligation reaction sorted on genetic arrays, restriction-fragment length polymorphism, single base extension-tag assays, and the Invader assay. Such methods may be used in combination with detection mechanisms such as, for example, luminescence or chemiluminescence detection, fluorescence detection, time-resolved fluorescence detection, fluorescence resonance energy transfer, fluorescence polarization, mass spectrometry, and electrical detection.

[0189] Various methods for detecting polymorphisms include, but are not limited to, methods in which protection from cleavage agents is used to detect mismatched bases in RNA/RNA or RNA/DNA duplexes (Myers et al., Science 230:1242 (1985); Cotton et al., PNAS 85:4397 (1988); and Saleeba et al., Meth. Enzymol. 217:286-295 (1992)), comparison of the electrophoretic mobility of variant and wild type nucleic acid molecules (Orita et al., PNAS 86:2766 (1989); Cotton et al., Mutat. Res. 285:125-144 (1993); and Hayashi et al., Genet. Anal. Tech. Appl. 9:73-79 (1992)), and assaying the movement of polymorphic or wild-type fragments in polyacrylamide gels containing a gradient of denaturant using denaturing gradient gel electrophoresis (DGGE) (Myers et al., Nature 313:495 (1985)). Sequence variations at specific locations can also be assessed by nuclease protection assays such as RNase and S1 protection or chemical cleavage methods.

[0190] In a preferred embodiment, SNP genotyping is performed using the TaqMan assay, which is also known as the 5′ nuclease assay (U.S. Pat. Nos. 5,210,015 and 5,538,848). The TaqMan assay detects the accumulation of a specific amplified product during PCR. The TaqMan assay utilizes an oligonucleotide probe labeled with a fluorescent reporter dye and a quencher dye. The reporter dye is excited by irradiation at an appropriate wavelength, it transfers energy to the quencher dye in the same probe via a process called fluorescence resonance energy transfer (FRET). When attached to the probe, the excited reporter dye does not emit a signal. The proximity of the quencher dye to the reporter dye in the intact probe maintains a reduced fluorescence for the reporter. The reporter dye and quencher dye may be at the 5′ most and the 3′ most ends, respectively, or vice versa. Alternatively, the reporter dye may be at the 5′ or 3′ most end while the quencher dye is attached to an internal nucleotide, or vice versa. In yet another embodiment, both the reporter and the quencher may be attached to internal nucleotides at a distance from each other such that fluorescence of the reporter is reduced.

[0191] During PCR, the 5′ nuclease activity of DNA polymerase cleaves the probe, thereby separating the reporter dye and the quencher dye and resulting in increased fluorescence of the reporter. Accumulation of PCR product is detected directly by monitoring the increase in fluorescence of the reporter dye. The DNA polymerase cleaves the probe between the reporter dye and the quencher dye only if the probe hybridizes to the target SNP-containing template which is amplified during PCR, and the probe is designed to hybridize to the target SNP site only if a particular SNP allele is present.

[0192] Preferred TaqMan primer and probe sequences can readily be determined using the SNP and associated nucleic acid sequence information provided herein. A number of computer programs, such as Primer Express (Applied Biosystems, Foster City, Calif.), can be used to rapidly obtain optimal primer/probe sets. It will be apparent to one of skill in the art that such primers and probes for detecting the SNPs of the present invention are useful in diagnostic assays for myocardial infarction and related pathologies, and can be readily incorporated into a kit format. The present invention also includes modifications of the Taqman assay well known in the art such as the use of Molecular Beacon probes (U.S. Pat. Nos. 5,118,801 and 5,312,728) and other variant formats (U.S. Pat. Nos. 5,866,336 and 6,117,635).

[0193] Another preferred method for genotyping the SNPs of the present invention is the use of two oligonucleotide probes in an OLA (see, e.g., U.S. Pat. No. 4,988,617). In this method, one probe hybridizes to a segment of a target nucleic acid with its 3′ most end aligned with the SNP site. A second probe hybridizes to an adjacent segment of the target nucleic acid molecule directly 3′ to the first probe. The two juxtaposed probes hybridize to the target nucleic acid molecule, and are ligated in the presence of a linking agent such as a ligase if there is perfect complementarity between the 3′ most nucleotide of the first probe with the SNP site. If there is a mismatch, ligation would not occur. After the reaction, the ligated probes are separated from the target nucleic acid molecule, and detected as indicators of the presence of a SNP.

[0194] The following patents, patent applications, and published international patent applications, which are all hereby incorporated by reference, provide additional information pertaining to techniques for carrying out various types of OLA: U.S. Pat. Nos. 6,027,889, 6,268,148, 5,494,810, 5,830,711, and 6,054,564 describe OLA strategies for performing SNP detection; WO 97/31256 and WO 00/56927 describe OLA strategies for performing SNP detection using universal arrays, wherein a zipcode sequence can be introduced into one of the hybridization probes, and the resulting product, or amplified product, hybridized to a universal zip code array; U.S. application Ser. Nos. 01/17,329 (and 09/584,905) describes OLA (or LDR) followed by PCR, wherein zipcodes are incorporated into OLA probes, and amplified PCR products are determined by electrophoretic or universal zipcode array readout; U.S. applications 60/427,818, 60/445,636, and 60/445,494 describe SNPlex methods and software for multiplexed SNP detection using OLA followed by PCR, wherein zipcodes are incorporated into OLA probes, and amplified PCR products are hybridized with a zipchute reagent, and the identity of the SNP determined from electrophoretic readout of the zipchute. In some embodiments, OLA is carried out prior to PCR (or another method of nucleic acid amplification). In other embodiments, PCR (or another method of nucleic acid amplification) is carried out prior to OLA.

[0195] Another method for SNP genotyping is based on mass spectrometry. Mass spectrometry takes advantage of the unique mass of each of the four nucleotides of DNA. SNPs can be unambiguously genotyped by mass spectrometry by measuring the differences in the mass of nucleic acids having alternative SNP alleles. MALDI-TOF (Matrix Assisted Laser Desorption Ionization-Time of Flight) mass spectrometry technology is preferred for extremely precise determinations of molecular mass, such as SNPs. Numerous approaches to SNP analysis have been developed based on mass spectrometry. Preferred mass spectrometry-based methods of SNP genotyping include primer extension assays, which can also be utilized in combination with other approaches, such as traditional gel-based formats and microarrays.

[0196] Typically, the primer extension assay involves designing and annealing a primer to a template PCR amplicon upstream (5′) from a target SNP position. A mix of dideoxynucleotide triphosphates (ddNTPs) and/or deoxynucleotide triphosphates (dNTPs) are added to a reaction mixture containing template (e.g., a SNP-containing nucleic acid molecule which has typically been amplified, such as by PCR), primer, and DNA polymerase. Extension of the primer terminates at the first position in the template where a nucleotide complementary to one of the ddNTPs in the mix occurs. The primer can be either immediately adjacent (i.e., the nucleotide at the 3′ end of the primer hybridizes to the nucleotide next to the target SNP site) or two or more nucleotides removed from the SNP position. If the primer is several nucleotides removed from the target SNP position, the only limitation is that the template sequence between the 3′ end of the primer and the SNP position cannot contain a nucleotide of the same type as the one to be detected, or this will cause premature termination of the extension primer. Alternatively, if all four ddNTPs alone, with no dNTPs, are added to the reaction mixture, the primer will always be extended by only one nucleotide, corresponding to the target SNP position. In this instance, primers are designed to bind one nucleotide upstream from the SNP position (i.e., the nucleotide at the 3′ end of the primer hybridizes to the nucleotide that is immediately adjacent to the target SNP site on the 5′ side of the target SNP site). Extension by only one nucleotide is preferable, as it minimizes the overall mass of the extended primer, thereby increasing the resolution of mass differences between alternative SNP nucleotides. Furthermore, mass-tagged ddNTPs can be employed in the primer extension reactions in place of unmodified ddNTPs. This increases the mass difference between primers extended with these ddNTPs, thereby providing increased sensitivity and accuracy, and is particularly useful for typing heterozygous base positions. Mass-tagging also alleviates the need for intensive sample-preparation procedures and decreases the necessary resolving power of the mass spectrometer.

[0197] The extended primers can then be purified and analyzed by MALDI-TOF mass spectrometry to determine the identity of the nucleotide present at the target SNP position. In one method of analysis, the products from the primer extension reaction are combined with light absorbing crystals that form a matrix. The matrix is then hit with an energy source such as a laser to ionize and desorb the nucleic acid molecules into the gas-phase. The ionized molecules are then ejected into a flight tube and accelerated down the tube towards a detector. The time between the ionization event, such as a laser pulse, and collision of the molecule with the detector is the time of flight of that molecule. The time of flight is precisely correlated with the mass-to-charge ratio (m/z) of the ionized molecule. Ions with smaller m/z travel down the tube faster than ions with larger m/z and therefore the lighter ions reach the detector before the heavier ions. The time-of-flight is then converted into a corresponding, and highly precise, m/z. In this manner, SNPs can be identified based on the slight differences in mass, and the corresponding time of flight differences, inherent in nucleic acid molecules having different nucleotides at a single base position. For further information regarding the use of primer extension assays in conjunction with MALDI-TOF mass spectrometry for SNP genotyping, see, e.g., Wise et al., “A standard protocol for single nucleotide primer extension in the human genome using matrix-assisted laser desorption/ionization time-of-flight mass spectrometry”, Rapid Commun Mass Spectrom. 2003;17(11): 1195-202.

[0198] The following references provide further information describing mass spectrometry-based methods for SNP genotyping: Bocker, “SNP and mutation discovery using base-specific cleavage and MALDI-TOF mass spectrometry”, Bioinformatics. July 2003;19 Suppl 1:I44-I53; Storm et al., “MALDI-TOF mass spectrometry-based SNP genotyping”, Methods Mol Biol. 2003;212:241-62; Jurinke et al., “The use of MassARRAY technology for high throughput genotyping”, Adv Biochem Eng Biotechnol. 2002;77:57-74; and Jurinke et al., “Automated genotyping using the DNA MassArray technology”, Methods Mol Biol. 2002;187:179-92.

[0199] SNPs can also be scored by direct DNA sequencing. A variety of automated sequencing procedures can be utilized ((1995) Biotechniques 19:448), including sequencing by mass spectrometry (see, e.g., PCT International Publication No. WO94/16101; Cohen et al., Adv. Chromatogr. 36:127-162(1996); and Griffin et al., Appl. Biochem. Biotechnol. 38:147-159 (1993)). The nucleic acid sequences of the present invention enable one of ordinary skill in the art to readily design sequencing primers for such automated sequencing procedures. Commercial instrumentation, such as the Applied Biosystems 377, 3100, 3700, 3730, and 3730x1 DNA Analyzers (Foster City, Calif.), is commonly used in the art for automated sequencing.

[0200] Other methods that can be used to genotype the SNPs of the present invention include single-strand conformational polymorphism (SSCP), and denaturing gradient gel electrophoresis (DGGE) (Myers et al., Nature 313:495 (1985)). SSCP identifies base differences by alteration in electrophoretic migration of single stranded PCR products, as described in Orita et al., Proc. Nat. Acad. Single-stranded PCR products can be generated by heating or otherwise denaturing double stranded PCR products. Single-stranded nucleic acids may refold or form secondary structures that are partially dependent on the base sequence. The different electrophoretic mobilities of single-stranded amplification products are related to base-sequence differences at SNP positions. DGGE differentiates SNP alleles based on the different sequence-dependent stabilities and melting properties inherent in polymorphic DNA and the corresponding differences in electrophoretic migration patterns in a denaturing gradient gel (Erlich, ed., PCR Technology, Principles and Applications for DNA Amplification, W.H. Freeman and Co, New York, 1992, Chapter 7).

[0201] Sequence-specific ribozymes (U.S. Pat. No. 5,498,531) can also be used to score SNPs based on the development or loss of a ribozyme cleavage site. Perfectly matched sequences can be distinguished from mismatched sequences by nuclease cleavage digestion assays or by differences in melting temperature. If the SNP affects a restriction enzyme cleavage site, the SNP can be identified by alterations in restriction enzyme digestion patterns, and the corresponding changes in nucleic acid fragment lengths determined by gel electrophoresis

[0202] SNP genotyping can include the steps of, for example, collecting a biological sample from a human subject (e.g., sample of tissues, cells, fluids, secretions, etc.), isolating nucleic acids (e.g., genomic DNA, mRNA or both) from the cells of the sample, contacting the nucleic acids with one or more primers which specifically hybridize to a region of the isolated nucleic acid containing a target SNP under conditions such that hybridization and amplification of the target nucleic acid region occurs, and determining the nucleotide present at the SNP position of interest, or, in some assays, detecting the presence or absence of an amplification product (assays can be designed so that hybridization and/or amplification will only occur if a particular SNP allele is present or absent). In some assays, the size of the amplification product is detected and compared to the length of a control sample; for example, deletions and insertions can be detected by a change in size of the amplified product compared to a normal genotype.

[0203] SNP genotyping is useful for numerous practical applications, as described below. Examples of such applications include, but are not limited to, SNP-disease association analysis, disease predisposition screening, disease diagnosis, disease prognosis, disease progression monitoring, determining therapeutic strategies based on an individual's genotype (“pharmacogenomics”), developing therapeutic agents based on SNP genotypes associated with a disease or likelihood of responding to a drug, stratifying a patient population for clinical trial for a treatment regimen, predicting the likelihood that an individual will experience toxic side effects from a therapeutic agent, and human identification applications such as forensics.

[0204] Analysis of Genetic Association Between SNPs and Phenotypic Traits

[0205] SNP genotyping for disease diagnosis, disease predisposition screening, disease prognosis, determining drug responsiveness (pharmacogenomics), drug toxicity screening, and other uses described herein, typically relies on initially establishing a genetic association between one or more specific SNPs and the particular phenotypic traits of interest.

[0206] Different study designs may be used for genetic association studies (Modern Epidemiology, Lippincott Williams & Wilkins (1998), 609-622). Observational studies are most frequently carried out in which the response of the patients is not interfered with. The first type of observational study identifies a sample of persons in whom the suspected cause of the disease is present and another sample of persons in whom the suspected cause is absent, and then the frequency of development of disease in the two samples is compared. These sampled populations are called cohorts, and the study is a prospective study. The other type of observational study is case-control or a retrospective study. In typical case-control studies, samples are collected from individuals with the phenotype of interest (cases) such as certain manifestations of a disease, and from individuals without the phenotype (controls) in a population (target population) that conclusions are to be drawn from. Then the possible causes of the disease are investigated retrospectively. As the time and costs of collecting samples in case-control studies are considerably less than those for prospective studies, case-control studies are the more commonly used study design in genetic association studies, at least during the exploration and discovery stage.

[0207] In both types of observational studies, there may be potential confounding factors that should be taken into consideration. Confounding factors are those that are associated with both the real cause(s) of the disease and the disease itself, and they include demographic information such as age, gender, ethnicity as well as environmental factors. When confounding factors are not matched in cases and controls in a study, and are not controlled properly, spurious association results can arise. If potential confounding factors are identified, they should be controlled for by analysis methods explained below.

[0208] In a genetic association study, the cause of interest to be tested is a certain allele or a SNP or a combination of alleles or a haplotype from several SNPs. Thus, tissue specimens (e.g., whole blood) from the sampled individuals may be collected and genomic DNA genotyped for the SNP(s) of interest. In addition to the phenotypic trait of interest, other information such as demographic (e.g., age, gender, ethnicity, etc.), clinical, and environmental information that may influence the outcome of the trait can be collected to further characterize and define the sample set. In many cases, these factors are known to be associated with diseases and/or SNP allele frequencies. There are likely gene-environment and/or gene-gene interactions as well. Analysis methods to address gene-environment and gene-gene interactions (for example, the effects of the presence of both susceptibility alleles at two different genes can be greater than the effects of the individual alleles at two genes combined) are discussed below.

[0209] After all the relevant phenotypic and genotypic information has been obtained, statistical analyses are carried out to determine if there is any significant correlation between the presence of an allele or a genotype with the phenotypic characteristics of an individual. Preferably, data inspection and cleaning are first performed before carrying out statistical tests for genetic association. Epidemiological and clinical data of the samples can be summarized by descriptive statistics with tables and graphs. Data validation is preferably performed to check for data completion, inconsistent entries, and outliers. Chi-squared tests and t-tests (Wilcoxon rank-sum tests if distributions are not normal) may then be used to check for significant differences between cases and controls for discrete and continuous variables, respectively. To ensure genotyping quality, Hardy-Weinberg disequilibrium tests can be performed on cases and controls separately. Significant deviation from Hardy-Weinberg equilibrium (HWE) in both cases and controls for individual markers can be indicative of genotyping errors. If HWE is violated in a majority of markers, it is indicative of population substructure that should be further investigated. Moreover, Hardy-Weinberg disequilibrium in cases only can indicate genetic association of the markers with the disease (Genetic Data Analysis, Weir B., Sinauer (1990)).

[0210] To test whether an allele of a single SNP is associated with the case or control status of a phenotypic trait, one skilled in the art can compare allele frequencies in cases and controls. Standard chi-squared tests and Fisher exact tests can be carried out on a 2×2 table (2 SNP alleles×2 outcomes in the categorical trait of interest). To test whether genotypes of a SNP are associated, chi-squared tests can be carried out on a 3×2 table (3 genotypes×2 outcomes). Score tests are also carried out for genotypic association to contrast the three genotypic frequencies (major homozygotes, heterozygotes and minor homozygotes) in cases and controls, and to look for trends using 3 different modes of inheritance, namely dominant (with contrast coefficients 2, −1, −1), additive (with contrast coefficients 1, 0, −1) and recessive (with contrast coefficients 1, 1, −2). Odds ratios for minor versus major alleles, and odds ratios for heterozygote and homozygote variants versus the wild type genotypes are calculated with the desired confidence limits, usually 95%.

[0211] In order to control for confounders and to test for interaction and effect modifiers, stratified analyses may be performed using stratified factors that are likely to be confounding, including demographic information such as age, ethnicity, and gender, or an interacting element or effect modifier, such as a known major gene (e.g., APOE for Alzheimer's disease or HLA genes for autoimmune diseases), or environmental factors such as smoking in lung cancer. Stratified association tests may be carried out using Cochran-Mantel-Haenszel tests that take into account the ordinal nature of genotypes with 0, 1, and 2 variant alleles. Exact tests by StatXact may also be performed when computationally possible. Another way to adjust for confounding effects and test for interactions is to perform stepwise multiple logistic regression analysis using statistical packages such as SAS or R. Logistic regression is a model-building technique in which the best fitting and most parsimonious model is built to describe the relation between the dichotomous outcome (for instance, getting a certain disease or not) and a set of independent variables (for instance, genotypes of different associated genes, and the associated demographic and environmental factors). The most common model is one in which the logit transformation of the odds ratios is expressed as a linear combination of the variables (main effects) and their cross-product terms (interactions) (Applied Logistic Regression, Hosmer and Lemeshow, Wiley (2000)). To test whether a certain variable or interaction is significantly associated with the outcome, coefficients in the model are first estimated and then tested for statistical significance of their departure from zero.

[0212] In addition to performing association tests one marker at a time, haplotype association analysis may also be performed to study a number of markers that are closely linked together. Haplotype association tests can have better power than genotypic or allelic association tests when the tested markers are not the disease-causing mutations themselves but are in linkage disequilibrium with such mutations. The test will even be more powerful if the disease is indeed caused by a combination of alleles on a haplotype (e.g., APOE is a haplotype formed by 2 SNPs that are very close to each other). In order to perform haplotype association effectively, marker-marker linkage disequilibrium measures, both D′ and R², are typically calculated for the markers within a gene to elucidate the haplotype structure. Recent studies (Daly et al, Nature Genetics, 29, 232-235, 2001) in linkage disequilibrium indicate that SNPs within a gene are organized in block pattern, and a high degree of linkage disequilibrium exists within blocks and very little linkage disequilibrium exists between blocks. Haplotype association with the disease status can be performed using such blocks once they have been elucidated.

[0213] Haplotype association tests can be carried out in a similar fashion as the allelic and genotypic association tests. Each haplotype in a gene is analogous to an allele in a multi-allelic marker. One skilled in the art can either compare the haplotype frequencies in cases and controls or test genetic association with different pairs of haplotypes. It has been proposed (Schaid et al, Am. J. Hum. Genet., 70, 425-434, 2002) that score tests can be done on haplotypes using the program “haplo.score”. In that method, haplotypes are first inferred by EM algorithm and score tests are carried out with a generalized linear model (GLM) framework that allows the adjustment of other factors.

[0214] An important decision in the performance of genetic association tests is the determination of the significance level at which significant association can be declared when the p-value of the tests reaches that level. In an exploratory analysis where positive hits will be followed up in subsequent confirmatory testing, an unadjusted p-value <0.1 (a significance level on the lenient side) may be used for generating hypotheses for significant association of a SNP with certain phenotypic characteristics of a disease. It is preferred that a p-value <0.05 (a significance level traditionally used in the art) is achieved in order for a SNP to be considered to have an association with a disease. It is more preferred that a p-value <0.01 (a significance level on the stringent side) is achieved for an association to be declared. When hits are followed up in confirmatory analyses in more samples of the same source or in different samples from different sources, adjustment for multiple testing will be performed as to avoid excess number of hits while maintaining the experiment-wise error rates at 0.05. While there are different methods to adjust for multiple testing to control for different kinds of error rates, a commonly used but rather conservative method is Bonferroni correction to control the experiment-wise or family-wise error rate (Multiple comparisons and multiple tests, Westfall et al, SAS Institute (1999)). Permutation tests to control for the false discovery rates, FDR, can be more powerful (Benjamnini and Hochberg, Journal of the Royal Statistical Society, Series B 57, 1289-1300, 1995, Resampling-based Multiple Testing, Westfall and Young, Wiley (1993)). Such methods to control for multiplicity would be preferred when the tests are dependent and controlling for false discovery rates is sufficient as opposed to controlling for the experiment-wise error rates.

[0215] In replication studies using samples from different populations after statistically significant markers have been identified in the exploratory stage, meta-analyses can then be performed by combining evidence of different studies (Modern Epidemiology, Lippincott Williams & Wilkins, 1998, 643-673). If available, association results known in the art for the same SNPs can be included in the meta-analyses.

[0216] Since both genotyping and disease status classification can involve errors, sensitivity analyses may be performed to see how odds ratios and p-values would change upon various estimates on genotyping and disease classification error rates.

[0217] It has been well known that subpopulation-based sampling bias between cases and controls can lead to spurious results in case-control association studies (Ewens and Spielman, Am. J. Hum. Genet. 62, 450-458, 1995) when prevalence of the disease is associated with different subpopulation groups. Such bias can also lead to a loss of statistical power in genetic association studies. To detect population stratification, Pritchard and Rosenberg (Pritchard et al. Am. J. Hum. Gen. 1999, 65:220-228) suggested typing markers that are unlinked to the disease and using results of association tests on those markers to determine whether there is any population stratification. When stratification is detected, the genomic control (GC) method as proposed by Devin and Roeder (Devin et al. Biometrics 1999, 55:997-1004) can be used to adjust for the inflation of test statistics due to population stratification. GC method is robust to changes in population structure levels as well as being applicable to DNA pooling designs (Devin et al. Genet. Epidem. 20001, 21:273-284).

[0218] While Pritchard's method recommended using 15-20 unlinked microsatellite markers, it suggested using more than 30 biallelic markers to get enough power to detect population stratification. For the GC method, it has been shown (Bacanu et al. Am. J. Hum. Genet. 2000, 66:1933-1944) that about 60-70 biallelic markers are sufficient to estimate the inflation factor for the test statistics due to population stratification. Hence, 70 intergenic SNPs can be chosen in unlinked regions as indicated in a genome scan (Kehoe et al. Hum. Mol. Genet. 1999, 8:237-245).

[0219] Once individual risk factors, genetic or non-genetic, have been found for the predisposition to disease, the next step is to set up a classification/prediction scheme to predict the category (for instance, disease or no-disease) that an individual will be in depending on his genotypes of associated SNPs and other non-genetic risk factors. Logistic regression for discrete trait and linear regression for continuous trait are standard techniques for such tasks (Applied Regression Analysis, Draper and Smith, Wiley (1998)). Moreover, other techniques can also be used for setting up classification. Such techniques include, but are not limited to, MART, CART, neural network, and discriminant analyses that are suitable for use in comparing the performance of different methods (The Elements of Statistical Learning, Hastie, Tibshirani & Friedman, Springer (2002)).

[0220] Disease Diagnosis and Predisposition Screening

[0221] Information on association/correlation between genotypes and disease-related phenotypes can be exploited in several ways. For example, in the case of a highly statistically significant association between one or more SNPs with predisposition to a disease for which treatment is available, detection of such a genotype pattern in an individual may justify immediate administration of treatment, or at least the institution of regular monitoring of the individual. Detection of the susceptibility alleles associated with serious disease in a couple contemplating having children may also be valuable to the couple in their reproductive decisions. In the case of a weaker but still statistically significant association between a SNP and a human disease, immediate therapeutic intervention or monitoring may not be justified after detecting the susceptibility allele or SNP. Nevertheless, the subject can be motivated to begin simple life-style changes (e.g., diet, exercise) that can be accomplished at little or no cost to the individual but would confer potential benefits in reducing the risk of developing conditions for which that individual may have an increased risk by virtue of having the susceptibility allele(s).

[0222] The SNPs of the invention may contribute to myocardial infarction in an individual in different ways. Some polymorphisms occur within a protein coding sequence and contribute to disease phenotype by affecting protein structure. Other polymorphisms occur in noncoding regions but may exert phenotypic effects indirectly via influence on, for example, replication, transcription, and/or translation. A single SNP may affect more than one phenotypic trait. Likewise, a single phenotypic trait may be affected by multiple SNPs in different genes.

[0223] As used herein, the terms “diagnose”, “diagnosis”, and “diagnostics” include, but are not limited to any of the following: detection of myocardial infarction that an individual may presently have, predisposition screening (i.e., determining the increased risk of an individual in developing myocardial infarction in the future, or determining whether an individual has a decreased risk of developing myocardial infarction in the future), determining a particular type or subclass of myocardial infarction in an individual known to have myocardial infarction, confirming or reinforcing a previously made diagnosis of myocardial infarction, pharmacogenomic evaluation of an individual to determine which therapeutic strategy that individual is most likely to positively respond to or to predict whether a patient is likely to respond to a particular treatment, predicting whether a patient is likely to experience toxic effects from a particular treatment or therapeutic compound, and evaluating the future prognosis of an individual having myocardial infarction. Such diagnostic uses are based on the SNPs individually or in a unique combination or SNP haplotypes of the present invention.

[0224] Haplotypes are particularly useful in that, for example, fewer SNPs can be genotyped to determine if a particular genomic region harbors a locus that influences a particular phenotype, such as in linkage disequilibrium-based SNP association analysis.

[0225] Linkage disequilibrium (LD) refers to the co-inheritance of alleles (e.g., alternative nucleotides) at two or more different SNP sites at frequencies greater than would be expected from the separate frequencies of occurrence of each allele in a given population. The expected frequency of co-occurrence of two alleles that are inherited independently is the frequency of the first allele multiplied by the frequency of the second allele. Alleles that co-occur at expected frequencies are said to be in “linkage equilibrium”. In contrast, LD refers to any non-random genetic association between allele(s) at two or more different SNP sites, which is generally due to the physical proximity of the two loci along a chromosome. LD can occur when two or more SNPs sites are in close physical proximity to each other on a given chromosome and therefore alleles at these SNP sites will tend to remain unseparated for multiple generations with the consequence that a particular nucleotide (allele) at one SNP site will show a non-random association with a particular nucleotide (allele) at a different SNP site located nearby. Hence, genotyping one of the SNP sites will give almost the same information as genotyping the other SNP site that is in LD.

[0226] For diagnostic purposes, if a particular SNP site is found to be useful for diagnosing myocardial infarction, then the skilled artisan would recognize that other SNP sites which are in LD with this SNP site would also be useful for diagnosing the condition. Various degrees of LD can be encountered between two or more SNPs with the result being that some SNPs are more closely associated (i.e., in stronger LD) than others. Furthermore, the physical distance over which LD extends along a chromosome differs between different regions of the genome, and therefore the degree of physical separation between two or more SNP sites necessary for LD to occur can differ between different regions of the genome.

[0227] For diagnostic applications, polymorphisms (e.g., SNPs and/or haplotypes) that are not the actual disease-causing (causative) polymorphisms, but are in LD with such causative polymorphisms, are also useful. In such instances, the genotype of the polymorphism(s) that is/are in LD with the causative polymorphism is predictive of the genotype of the causative polymorphism and, consequently, predictive of the phenotype (e.g., myocardial infarction) that is influenced by the causative SNP(s). Thus, polymorphic markers that are in LD with causative polymorphisms are useful as diagnostic markers, and are particularly useful when the actual causative polymorphism(s) is/are unknown.

[0228] Linkage disequilibrium in the human genome is reviewed in: Wall et al., “Haplotype blocks and linkage disequilibrium in the human genome”, Nat Rev Genet. August 2003;4(8):587-97; Gamer et al., “On selecting markers for association studies: patterns of linkage disequilibrium between two and three diallelic loci”, Genet Epidemiol. January 2003;24(1):57-67; Ardlie et al., “Patterns of linkage disequilibrium in the human genome”, Nat Rev Genet. April 2002;3(4):299-309 (erratum in Nat Rev Genet July 2002;3(7):566); and Remm et al., “High-density genotyping and linkage disequilibrium in the human genome using chromosome 22 as a model”; Curr Opin Chem Biol. February 2002;6(1):24-30.

[0229] The contribution or association of particular SNPs and/or SNP haplotypes with disease phenotypes, such as myocardial infarction, enables the SNPs of the present invention to be used to develop superior diagnostic tests capable of identifying individuals who express a detectable trait, such as myocardial infarction, as the result of a specific genotype, or individuals whose genotype places them at an increased or decreased risk of developing a detectable trait at a subsequent time as compared to individuals who do not have that genotype. As described herein, diagnostics may be based on a single SNP or a group of SNPs. Combined detection of a plurality of SNPs (for example, 2, 3, 4, 5, 6, 7, 8, 9, 10, 11, 12, 13, 14, 15, 16, 17, 18, 19, 20, 24, 25, 30, 32, 48, 50, 64, 96, 100, or any other number in-between, or more, of the SNPs provided in Table 1 and/or Table 2) typically increases the probability of an accurate diagnosis. For example, the presence of a single SNP known to correlate with myocardial infarction might indicate a probability of 20% that an individual has or is at risk of developing myocardial infarction, whereas detection of five SNPs, each of which correlates with myocardial infarction, might indicate a probability of 80% that an individual has or is at risk of developing myocardial infarction. To further increase the accuracy of diagnosis or predisposition screening, analysis of the SNPs of the present invention can be combined with that of other polymorphisms or other risk factors of myocardial infarction, such as disease symptoms, pathological characteristics, family history, diet, environmental factors or lifestyle factors.

[0230] It will, of course, be understood by practitioners skilled in the treatment or diagnosis of myocardial infarction that the present invention generally does not intend to provide an absolute identification of individuals who are at risk (or less at risk) of developing myocardial infarction, and/or pathologies related to myocardial infarction, but rather to indicate a certain increased (or decreased) degree or likelihood of developing the disease based on statistically significant association results. However, this information is extremely valuable as it can be used to, for example, initiate preventive treatments or to allow an individual carrying one or more significant SNPs or SNP haplotypes to foresee warning signs such as minor clinical symptoms, or to have regularly scheduled physical exams to monitor for appearance of a condition in order to identify and begin treatment of the condition at an early stage. Particularly with diseases that are extremely debilitating or fatal if not treated on time, the knowledge of a potential predisposition, even if this predisposition is not absolute, would likely contribute in a very significant manner to treatment efficacy.

[0231] The diagnostic techniques of the present invention may employ a variety of methodologies to determine whether a test subject has a SNP or a SNP pattern associated with an increased or decreased risk of developing a detectable trait or whether the individual suffers from a detectable trait as a result of a particular polymorphism/mutation, including, for example, methods which enable the analysis of individual chromosomes for haplotyping, family studies, single sperm DNA analysis, or somatic hybrids. The trait analyzed using the diagnostics of the invention may be any detectable trait that is commonly observed in pathologies and disorders related to myocardial infarction.

[0232] Another aspect of the present invention relates to a method of determining whether an individual is at risk (or less at risk) of developing one or more traits or whether an individual expresses one or more traits as a consequence of possessing a particular trait-causing or trait-influencing allele. These methods generally involve obtaining a nucleic acid sample from an individual and assaying the nucleic acid sample to determine which nucleotide(s) is/are present at one or more SNP positions, wherein the assayed nucleotide(s) is/are indicative of an increased or decreased risk of developing the trait or indicative that the individual expresses the trait as a result of possessing a particular trait-causing or trait-influencing allele.

[0233] In another embodiment, the SNP detection reagents of the present invention are used to determine whether an individual has one or more SNP allele(s) affecting the level (e.g., the concentration of mRNA or protein in a sample, etc.) or pattern (e.g., the kinetics of expression, rate of decomposition, stability profile, Km, Vmax, etc.) of gene expression (collectively, the “gene response” of a cell or bodily fluid). Such a determination can be accomplished by screening for mRNA or protein expression (e.g., by using nucleic acid arrays, RT-PCR, TaqMan assays, or mass spectrometry), identifying genes having altered expression in an individual, genotyping SNPs disclosed in Table 1 and/or Table 2 that could affect the expression of the genes having altered expression (e.g., SNPs that are in and/or around the gene(s) having altered expression, SNPs in regulatory/control regions, SNPs in and/or around other genes that are involved in pathways that could affect the expression of the gene(s) having altered expression, or all SNPs could be genotyped), and correlating SNP genotypes with altered gene expression. In this manner, specific SNP alleles at particular SNP sites can be identified that affect gene expression.

[0234] Pharmacogenomics and Therapeutics/Drug Development

[0235] The present invention provides methods for assessing the pharmacogenomics of a subject harboring particular SNP alleles or haplotypes to a particular therapeutic agent or pharmaceutical compound, or to a class of such compounds. Pharmacogenomics deals with the roles which clinically significant hereditary variations (e.g., SNPs) play in the response to drugs due to altered drug disposition and/or abnormal action in affected persons. See, e.g., Roses, Nature 405, 857-865 (2000); Gould Rothberg, Nature Biotechnology 19, 209-211 (2001); Eichelbaum, Clin. Exp. Pharmacol. Physiol. 23(10-11):983-985 (1996); and Linder, Clin. Chem. 43(2):254-266 (1997). The clinical outcomes of these variations can result in severe toxicity of therapeutic drugs in certain individuals or therapeutic failure of drugs in certain individuals as a result of individual variation in metabolism. Thus, the SNP genotype of an individual can determine the way a therapeutic compound acts on the body or the way the body metabolizes the compound. For example, SNPs in drug metabolizing enzymes can affect the activity of these enzymes, which in turn can affect both the intensity and duration of drug action, as well as drug metabolism and clearance.

[0236] The discovery of SNPs in drug metabolizing enzymes, drug transporters, proteins for pharmaceutical agents, and other drug targets has explained why some patients do not obtain the expected drug effects, show an exaggerated drug effect, or experience serious toxicity from standard drug dosages. SNPs can be expressed in the phenotype of the extensive metabolizer and in the phenotype of the poor metabolizer. Accordingly, SNPs may lead to allelic variants of a protein in which one or more of the protein functions in one population are different from those in another population. SNPs and the encoded variant peptides thus provide targets to ascertain a genetic predisposition that can affect treatment modality. For example, in a ligand-based treatment, SNPs may give rise to amino terminal extracellular domains and/or other ligand-binding regions of a receptor that are more or less active in ligand binding, thereby affecting subsequent protein activation. Accordingly, ligand dosage would necessarily be modified to maximize the therapeutic effect within a given population containing particular SNP alleles or haplotypes.

[0237] As an alternative to genotyping, specific variant proteins containing variant amino acid sequences encoded by alternative SNP alleles could be identified. Thus, pharmacogenomic characterization of an individual permits the selection of effective compounds and effective dosages of such compounds for prophylactic or therapeutic uses based on the individual's SNP genotype, thereby enhancing and optimizing the effectiveness of the therapy. Furthermore, the production of recombinant cells and transgenic animals containing particular SNPs/haplotypes allow effective clinical design and testing of treatment compounds and dosage regimens. For example, transgenic animals can be produced that differ only in specific SNP alleles in a gene that is orthologous to a human disease susceptibility gene.

[0238] Pharmacogenomic uses of the SNPs of the present invention provide several significant advantages for patient care, particularly in treating myocardial infarction. Pharmacogenomic characterization of an individual, based on an individual's SNP genotype, can identify those individuals unlikely to respond to treatment with a particular medication and thereby allows physicians to avoid prescribing the ineffective medication to those individuals. On the other hand, SNP genotyping of an individual may enable physicians to select the appropriate medication and dosage regimen that will be most effective based on an individual's SNP genotype. This information increases a physician's confidence in prescribing medications and motivates patients to comply with their drug regimens. Furthermore, pharmacogenomics may identify patients predisposed to toxicity and adverse reactions to particular drugs or drug dosages. Adverse drug reactions lead to more than 100,000 avoidable deaths per year in the United States alone and therefore represent a significant cause of hospitalization and death, as well as a significant economic burden on the healthcare system (Pfost et. al., Trends in Biotechnology, August 2000.). Thus, pharmacogenomics based on the SNPs disclosed herein has the potential to both save lives and reduce healthcare costs substantially.

[0239] Pharmacogenomics in general is discussed further in Rose et al., “Pharmacogenetic analysis of clinically relevant genetic polymorphisms”, Methods Mol Med. 2003;85:225-37. Pharmacogenomics as it relates to Alzheimer's disease and other neurodegenerative disorders is discussed in Cacabelos, “Pharmacogenomics for the treatment of dementia”, Ann Med. 2002;34(5):357-79, Maimone et al., “Pharmacogenomics of neurodegenerative diseases”, Eur J Pharmacol. Feb. 9, 2001;413(1):11-29, and Poirier, “Apolipoprotein E: a pharmacogenetic target for the treatment of Alzheimer's disease”, Mol Diagn. December 1999;4 (4):335-41. Pharmacogenomics as it relates to cardiovascular disorders is discussed in Siest et al., “Pharmacogenomics of drugs affecting the cardiovascular system”, Clin Chem Lab Med. April 2003;41(4):590-9, Mukheijee et al., “Pharmacogenomics in cardiovascular diseases”, Prog Cardiovasc Dis. May-June 2002;44(6):479-98, and Mooser et al., “Cardiovascular pharmacogenetics in the SNP era”, J Thromb Haemost. July 2003;1(7):1398-402. Pharmacogenomics as it relates to cancer is discussed in McLeod et al., “Cancer pharmacogenomics: SNPs, chips, and the individual patient”, Cancer Invest. 2003;21(4):630-40 and Watters et al., “Cancer pharmacogenomics: current and future applications”, Biochim Biophys Acta. Mar. 17, 2003;1603(2):99-111.

[0240] The SNPs of the present invention also can be used to identify novel therapeutic targets for myocardial infarction. For example, genes containing the disease-associated variants (“variant genes”) or their products, as well as genes or their products that are directly or indirectly regulated by or interacting with these variant genes or their products, can be targeted for the development of therapeutics that, for example, treat the disease or prevent or delay disease onset. The therapeutics may be composed of, for example, small molecules, proteins, protein fragments or peptides, antibodies, nucleic acids, or their derivatives or mimetics which modulate the functions or levels of the target genes or gene products.

[0241] The SNP-containing nucleic acid molecules disclosed herein, and their complementary 30 nucleic acid molecules, may be used as antisense constructs to control gene expression in cells, tissues, and organisms. Antisense technology is well established in the art and extensively reviewed in Antisense Drug Technology: Principles, Strategies, and Applications, Crooke (ed.), Marcel Dekker, Inc.: New York (2001). An antisense nucleic acid molecule is generally designed to be complementary to a region of mRNA expressed by a gene so that the antisense molecule hybridizes to the mRNA and thereby blocks translation of mRNA into protein. Various classes of antisense oligonucleotides are used in the art, two of which are cleavers and blockers. Cleavers, by binding to target RNAs, activate intracellular nucleases (e.g., RNaseH or RNase L) that cleave the target RNA. Blockers, which also bind to target RNAs, inhibit protein translation through steric hindrance of ribosomes. Exemplary blockers include peptide nucleic acids, morpholinos, locked nucleic acids, and methylphosphonates (see, e.g., Thompson, Drug Discovery Today, 7 (17): 912-917 (2002)). Antisense oligonucleotides are directly useful as therapeutic agents, and are also useful for determining and validating gene function (e.g., in gene knock-out or knock-down experiments).

[0242] Antisense technology is further reviewed in: Lavery et al., “Antisense and RNAi: powerful tools in drug target discovery and validation”, Curr Opin Drug Discov Devel. July 2003;6(4):561-9; Stephens et al., “Antisense oligonucleotide therapy in cancer”, Curr Opin Mol Ther. April 2003;5(2): 118-22; Kurreck, “Antisense technologies. Improvement through novel chemical modifications”, Eur J Biochem. April 2003;270(8):1628-44; Dias et al., “Antisense oligonucleotides: basic concepts and mechanisms”, Mol Cancer Ther. March 2002;1(5):347-55; Chen, “Clinical development of antisense oligonucleotides as anti-cancer therapeutics”, Methods Mol Med. 2003;75:621-36; Wang et al., “Antisense anticancer oligonucleotide therapeutics”, Curr Cancer Drug Targets. November 2001;1(3):177-96; and Bennett, “Efficiency of antisense oligonucleotide drug discovery”, Antisense Nucleic Acid Drug Dev. June 2002;12(3):215-24.

[0243] The SNPs of the present invention are particularly useful for designing antisense reagents that are specific for particular nucleic acid variants. Based on the SNP information disclosed herein, antisense oligonucleotides can be produced that specifically target mRNA molecules that contain one or more particular SNP nucleotides. In this manner, expression of mRNA molecules that contain one or more undesired polymorphisms (e.g., SNP nucleotides that lead to a defective protein such as an amino acid substitution in a catalytic domain) can be inhibited or completely blocked. Thus, antisense oligonucleotides can be used to specifically bind a particular polymorphic form (e.g., a SNP allele that encodes a defective protein), thereby inhibiting translation of this form, but which do not bind an alternative polymorphic form (e.g., an alternative SNP nucleotide that encodes a protein having normal function).

[0244] Antisense molecules can be used to inactivate mRNA in order to inhibit gene expression and production of defective proteins. Accordingly, these molecules can be used to treat a disorder, such as myocardial infarction, characterized by abnormal or undesired gene expression or expression of certain defective proteins. This technique can involve cleavage by means of ribozymes containing nucleotide sequences complementary to one or more regions in the mRNA that attenuate the ability of the mRNA to be translated. Possible mRNA regions include, for example, protein-coding regions and particularly protein-coding regions corresponding to catalytic activities, substrate/ligand binding, or other functional activities of a protein.

[0245] The SNPs of the present invention are also useful for designing RNA interference reagents that specifically target nucleic acid molecules having particular SNP variants. RNA interference (RNAi), also referred to as gene silencing, is based on using double-stranded RNA (dsRNA) molecules to turn genes off. When introduced into a cell, dsRNAs are processed by the cell into short fragments (generally about 21, 22, or 23 nucleotides in length) known as small interfering RNAs (siRNAs) which the cell uses in a sequence-specific manner to recognize and destroy complementary RNAs (Thompson, Drug Discovery Today, 7 (17): 912-917 (2002)). Accordingly, an aspect of the present invention specifically contemplates isolated nucleic acid molecules that are about 18-26 nucleotides in length, preferably 21, 22, or 23 nucleotides in length, and the use of these nucleic acid molecules for RNAi. Because RNAi molecules, including siRNAs, act in a sequence-specific manner, the SNPs of the present invention can be used to design RNAi reagents that recognize and destroy nucleic acid molecules having specific SNP alleles/nucleotides (such as deleterious alleles that lead to the production of defective proteins), while not affecting nucleic acid molecules having alternative SNP alleles (such as alleles that encode proteins having normal function). As with antisense reagents, RNAi reagents may be directly useful as therapeutic agents (e.g., for turning off defective, disease-causing genes), and are also useful for characterizing and validating gene function (e.g., in gene knock-out or knock-down experiments).

[0246] The following references provide a further review of RNAi: Reynolds et al., “Rational siRNA design for RNA interference”, Nat Biotechnol. March 2004;22(3):326-30. Epub Feb. 1, 2004; Chi et al., “Genomewide view of gene silencing by small interfering RNAs”, PNAS 100(11):6343-6346, 2003; Vickers et al., “Efficient Reduction of Target RNAs by Small Interfering RNA and RNase H-dependent Antisense Agents”, J. Biol. Chem. 278: 7108-7118, 2003; Agami, “RNAi and related mechanisms and their potential use for therapy”, Curr Opin Chem Biol. December 2002;6(6):829-34; Lavery et al., “Antisense and RNAi: powerful tools in drug target discovery and validation”, Curr Opin Drug Discov Devel. July 2003;6(4):561-9; Shi, “Mammalian RNAi for the masses”, Trends Genet January 2003;19(1):9-12), Shuey et al., “RNAi: gene-silencing in therapeutic intervention”, Drug Discovery Today October 2002;7(20): 1040-1046; McManus et al., Nat Rev Genet October 2002;3(10):737-47; Xia et al., Nat Biotechnol October 2002;20(10):1006-10; Plasterk et al., Curr Opin Genet Dev October 2000;10(5):562-7; Bosher et al., Nat Cell Biol February 2000;2(2):E31-6; and Hunter, Curr Biol Jun. 17, 1999;9(12):R440-2).

[0247] A subject suffering from a pathological condition, such as myocardial infarction, ascribed to a SNP may be treated so as to correct the genetic defect (see Kren et al., Proc. Natl. Acad. Sci. USA 96:10349-10354 (1999)). Such a subject can be identified by any method that can detect the polymorphism in a biological sample drawn from the subject. Such a genetic defect may be permanently corrected by administering to such a subject a nucleic acid fragment incorporating a repair sequence that supplies the normal/wild-type nucleotide at the position of the SNP. This site-specific repair sequence can encompass an RNA/DNA oligonucleotide that operates to promote endogenous repair of a subject's genomic DNA. The site-specific repair sequence is administered in an appropriate vehicle, such as a complex with polyethylenimine, encapsulated in anionic liposomes, a viral vector such as an adenovirus, or other pharmaceutical composition that promotes intracellular uptake of the administered nucleic acid. A genetic defect leading to an inborn pathology may then be overcome, as the chimeric oligonucleotides induce incorporation of the normal sequence into the subject's genome. Upon incorporation, the normal gene product is expressed, and the replacement is propagated, thereby engendering a permanent repair and therapeutic enhancement of the clinical condition of the subject.

[0248] In cases in which a cSNP results in a variant protein that is ascribed to be the cause of, or a contributing factor to, a pathological condition, a method of treating such a condition can include administering to a subject experiencing the pathology the wild-type/normal cognate of the variant protein. Once administered in an effective dosing regimen, the wild-type cognate provides complementation or remediation of the pathological condition.

[0249] The invention further provides a method for identifying a compound or agent that can be used to treat myocardial infarction. The SNPs disclosed herein are useful as targets for the identification and/or development of therapeutic agents. A method for identifying a therapeutic agent or compound typically includes assaying the ability of the agent or compound to modulate the activity and/or expression of a SNP-containing nucleic acid or the encoded product and thus identifying an agent or a compound that can be used to treat a disorder characterized by undesired activity or expression of the SNP-containing nucleic acid or the encoded product. The assays can be performed in cell-based and cell-free systems. Cell-based assays can include cells naturally expressing the nucleic acid molecules of interest or recombinant cells genetically engineered to express certain nucleic acid molecules.

[0250] Variant gene expression in a myocardial infarction patient can include, for example, either expression of a SNP-containing nucleic acid sequence (for instance, a gene that contains a SNP can be transcribed into an mRNA transcript molecule containing the SNP, which can in turn be translated into a variant protein) or altered expression of a normal/wild-type nucleic acid sequence due to one or more SNPs (for instance, a regulatory/control region can contain a SNP that affects the level or pattern of expression of a normal transcript).

[0251] Assays for variant gene expression can involve direct assays of nucleic acid levels (e.g., mRNA levels), expressed protein levels, or of collateral compounds involved in a signal pathway. Further, the expression of genes that are up- or down-regulated in response to the signal pathway can also be assayed. In this embodiment, the regulatory regions of these genes can be operably linked to a reporter gene such as luciferase.

[0252] Modulators of variant gene expression can be identified in a method wherein, for example, a cell is contacted with a candidate compound/agent and the expression of mRNA determined. The level of expression of mRNA in the presence of the candidate compound is compared to the level of expression of mRNA in the absence of the candidate compound. The candidate compound can then be identified as a modulator of variant gene expression based on this comparison and be used to treat a disorder such as myocardial infarction that is characterized by variant gene expression (e.g., either expression of a SNP-containing nucleic acid or altered expression of a normal/wild-type nucleic acid molecule due to one or more SNPs that affect expression of the nucleic acid molecule) due to one or more SNPs of the present invention. When expression of mRNA is statistically significantly greater in the presence of the candidate compound than in its absence, the candidate compound is identified as a stimulator of nucleic acid expression. When nucleic acid expression is statistically significantly less in the presence of the candidate compound than in its absence, the candidate compound is identified as an inhibitor of nucleic acid expression.

[0253] The invention further provides methods of treatment, with the SNP or associated nucleic acid domain (e.g., catalytic domain, ligand/substrate-binding domain, regulatory/control region, etc.) or gene, or the encoded mRNA transcript, as a target, using a compound identified through drug screening as a gene modulator to modulate variant nucleic acid expression. Modulation can include either up-regulation (i.e., activation or agonization) or down-regulation (i.e., suppression or antagonization) of nucleic acid expression.

[0254] Expression of mRNA transcripts and encoded proteins, either wild type or variant, may be altered in individuals with a particular SNP allele in a regulatory/control element, such as a promoter or transcription factor binding domain, that regulates expression. In this situation, methods of treatment and compounds can be identified, as discussed herein, that regulate or overcome the variant regulatory/control element, thereby generating normal, or healthy, expression levels of either the wild type or variant protein.

[0255] The SNP-containing nucleic acid molecules of the present invention are also useful for monitoring the effectiveness of modulating compounds on the expression or activity of a variant gene, or encoded product, in clinical trials or in a treatment regimen. Thus, the gene expression pattern can serve as an indicator for the continuing effectiveness of treatment with the compound, particularly with compounds to which a patient can develop resistance, as well as an indicator for toxicities. The gene expression pattern can also serve as a marker indicative of a physiological response of the affected cells to the compound. Accordingly, such monitoring would allow either increased administration of the compound or the administration of alternative compounds to which the patient has not become resistant. Similarly, if the level of nucleic acid expression falls below a desirable level, administration of the compound could be commensurately decreased.

[0256] In another aspect of the present invention, there is provided a pharmaceutical pack comprising a therapeutic agent (e.g., a small molecule drug, antibody, peptide, antisense or RNAi nucleic acid molecule, etc.) and a set of instructions for administration of the therapeutic agent to humans diagnostically tested for one or more SNPs or SNP haplotypes provided by the present invention.

[0257] The SNPs/haplotypes of the present invention are also useful for improving many different aspects of the drug development process. For example, individuals can be selected for clinical trials based on their SNP genotype. Individuals with SNP genotypes that indicate that they are most likely to respond to the drug can be included in the trials and those individuals whose SNP genotypes indicate that they are less likely to or would not respond to the drug, or suffer adverse reactions, can be eliminated from the clinical trials. This not only improves the safety of clinical trials, but also will enhance the chances that the trial will demonstrate statistically significant efficacy. Furthermore, the SNPs of the present invention may explain why certain previously developed drugs performed poorly in clinical trials and may help identify a subset of the population that would benefit from a drug that had previously performed poorly in clinical trials, thereby “rescuing” previously developed drugs, and enabling the drug to be made available to a particular myocardial infarction patient population that can benefit from it.

[0258] SNPs have many important uses in drug discovery, screening, and development. A high probability exists that, for any gene/protein selected as a potential drug target, variants of that gene/protein will exist in a patient population. Thus, determining the impact of gene/protein variants on the selection and delivery of a therapeutic agent should be an integral aspect of the drug discovery and development process. (Jazwinska, A Trends Guide to Genetic Variation and Genomic Medicine, March 2002; S30-S36).

[0259] Knowledge of variants (e.g., SNPs and any corresponding amino acid polymorphisms) of a particular therapeutic target (e.g., a gene, mRNA transcript, or protein) enables parallel screening of the variants in order to identify therapeutic candidates (e.g., small molecule compounds, antibodies, antisense or RNAi nucleic acid compounds, etc.) that demonstrate efficacy across variants (Rothberg, Nat Biotechnol March 2001;19(3):209-11). Such therapeutic candidates would be expected to show equal efficacy across a larger segment of the patient population, thereby leading to a larger potential market for the therapeutic candidate.

[0260] Furthermore, identifying variants of a potential therapeutic target enables the most common form of the target to be used for selection of therapeutic candidates, thereby helping to ensure that the experimental activity that is observed for the selected candidates reflects the real activity expected in the largest proportion of a patient population (Jazwinska, A Trends Guide to Genetic Variation and Genomic Medicine, March 2002; S30-S36).

[0261] Additionally, screening therapeutic candidates against all known variants of a target can enable the early identification of potential toxicities and adverse reactions relating to particular variants. For example, variability in drug absorption, distribution, metabolism and excretion (ADME) caused by, for example, SNPs in therapeutic targets or drug metabolizing genes, can be identified, and this information can be utilized during the drug development process to minimize variability in drug disposition and develop therapeutic agents that are safer across a wider range of a patient population. The SNPs of the present invention, including the variant proteins and encoding polymorphic nucleic acid molecules provided in Tables 1-2, are useful in conjunction with a variety of toxicology methods established in the art, such as those set forth in Current Protocols in Toxicology, John Wiley & Sons, Inc., N.Y.

[0262] Furthermore, therapeutic agents that target any art-known proteins (or nucleic acid molecules, either RNA or DNA) may cross-react with the variant proteins (or polymorphic nucleic acid molecules) disclosed in Table 1, thereby significantly affecting the pharmacokinetic properties of the drug. Consequently, the protein variants and the SNP-containing nucleic acid molecules disclosed in Tables 1-2 are useful in developing, screening, and evaluating therapeutic agents that target corresponding art-known protein forms (or nucleic acid molecules). Additionally, as discussed above, knowledge of all polymorphic forms of a particular drug target enables the design of therapeutic agents that are effective against most or all such polymorphic forms of the drug target.

[0263] Pharmaceutical Compositions and Administration Thereof

[0264] Any of the myocardial infarction-associated proteins, and encoding nucleic acid molecules, disclosed herein can be used as therapeutic targets (or directly used themselves as therapeutic compounds) for treating myocardial infarction and related pathologies, and the present disclosure enables therapeutic compounds (e.g., small molecules, antibodies, therapeutic proteins, RNAi and antisense molecules, etc.) to be developed that target (or are comprised of) any of these therapeutic targets.

[0265] In general, a therapeutic compound will be administered in a therapeutically effective amount by any of the accepted modes of administration for agents that serve similar utilities. The actual amount of the therapeutic compound of this invention, i.e., the active ingredient, will depend upon numerous factors such as the severity of the disease to be treated, the age and relative health of the subject, the potency of the compound used, the route and form of administration, and other factors.

[0266] Therapeutically effective amounts of therapeutic compounds may range from, for example, approximately 0.01-50 mg per kilogram body weight of the recipient per day; preferably about 0.1-20 mg/kg/day. Thus, as an example, for administration to a 70 kg person, the dosage range would most preferably be about 7 mg to 1.4 g per day.

[0267] In general, therapeutic compounds will be administered as pharmaceutical compositions by any one of the following routes: oral, systemic (e.g., transdermal, intranasal, or by suppository), or parenteral (e.g., intramuscular, intravenous, or subcutaneous) administration. The preferred manner of administration is oral or parenteral using a convenient daily dosage regimen, which can be adjusted according to the degree of affliction. Oral compositions can take the form of tablets, pills, capsules, semisolids, powders, sustained release formulations, solutions, suspensions, elixirs, aerosols, or any other appropriate compositions.

[0268] The choice of formulation depends on various factors such as the mode of drug administration (e.g., for oral administration, formulations in the form of tablets, pills, or capsules are preferred) and the bioavailability of the drug substance. Recently, pharmaceutical formulations have been developed especially for drugs that show poor bioavailability based upon the principle that bioavailability can be increased by increasing the surface area, i.e., decreasing particle size. For example, U.S. Pat. No. 4,107,288 describes a pharmaceutical formulation having particles in the size range from 10 to 1,000 nm in which the active material is supported on a cross-linked matrix of macromolecules. U.S. Pat. No. 5,145,684 describes the production of a pharmaceutical formulation in which the drug substance is pulverized to nanoparticles (average particle size of 400 nm) in the presence of a surface modifier and then dispersed in a liquid medium to give a pharmaceutical formulation that exhibits remarkably high bioavailability.

[0269] Pharmaceutical compositions are comprised of, in general, a therapeutic compound in combination with at least one pharmaceutically acceptable excipient. Acceptable excipients are non-toxic, aid administration, and do not adversely affect the therapeutic benefit of the therapeutic compound. Such excipients may be any solid, liquid, semi-solid or, in the case of an aerosol composition, gaseous excipient that is generally available to one skilled in the art.

[0270] Solid pharmaceutical excipients include starch, cellulose, talc, glucose, lactose, sucrose, gelatin, malt, rice, flour, chalk, silica gel, magnesium stearate, sodium stearate, glycerol monostearate, sodium chloride, dried skim milk and the like. Liquid and semisolid excipients may be selected from glycerol, propylene glycol, water, ethanol and various oils, including those of petroleum, animal, vegetable or synthetic origin, e.g., peanut oil, soybean oil, mineral oil, sesame oil, etc. Preferred liquid carriers, particularly for injectable solutions, include water, saline, aqueous dextrose, and glycols.

[0271] Compressed gases may be used to disperse a compound of this invention in aerosol form. Inert gases suitable for this purpose are nitrogen, carbon dioxide, etc.

[0272] Other suitable pharmaceutical excipients and their formulations are described in Remington's Pharmaceutical Sciences, edited by E. W. Martin (Mack Publishing Company, 18th ed., 1990).

[0273] The amount of the therapeutic compound in a formulation can vary within the full range employed by those skilled in the art. Typically, the formulation will contain, on a weight percent (wt %) basis, from about 0.01-99.99 wt % of the therapeutic compound based on the total formulation, with the balance being one or more suitable pharmaceutical excipients. Preferably, the compound is present at a level of about 1-80 wt %.

[0274] Therapeutic compounds can be administered alone or in combination with other therapeutic compounds or in combination with one or more other active ingredient(s). For example, an inhibitor or stimulator of a myocardial infarction-associated protein can be administered in combination with another agent that inhibits or stimulates the activity of the same or a different myocardial infarction-associated protein to thereby counteract the affects of myocardial infarction.

[0275] For further information regarding pharmacology, see Current Protocols in Pharmacology, John Wiley & Sons, Inc., N.Y.

[0276] Human Identification Applications

[0277] In addition to their diagnostic and therapeutic uses in myocardial infarction and related pathologies, the SNPs provided by the present invention are also useful as human identification markers for such applications as forensics, paternity testing, and biometrics (see, e.g., Gill, “An assessment of the utility of single nucleotide polymorphisms (SNPs) for forensic purposes”, Int J Legal Med. 2001;114(4-5):204-10). Genetic variations in the nucleic acid sequences between individuals can be used as genetic markers to identify individuals and to associate a biological sample with an individual. Determination of which nucleotides occupy a set of SNP positions in an individual identifies a set of SNP markers that distinguishes the individual. The more SNP positions that are analyzed, the lower the probability that the set of SNPs in one individual is the same as that in an unrelated individual. Preferably, if multiple sites are analyzed, the sites are unlinked (i.e., inherited independently). Thus, preferred sets of SNPs can be selected from among the SNPs disclosed herein, which may include SNPs on different chromosomes, SNPs on different chromosome arms, and/or SNPs that are dispersed over substantial distances along the same chromosome arm.

[0278] Furthermore, among the SNPs disclosed herein, preferred SNPs for use in certain forensic/human identification applications include SNPs located at degenerate codon positions (i.e., the third position in certain codons which can be one of two or more alternative nucleotides and still encode the same amino acid), since these SNPs do not affect the encoded protein. SNPs that do not affect the encoded protein are expected to be under less selective pressure and are therefore expected to be more polymorphic in a population, which is typically an advantage for forensic/human identification applications. However, for certain forensics/human identification applications, such as predicting phenotypic characteristics (e.g., inferring ancestry or inferring one or more physical characteristics of an individual) from a DNA sample, it may be desirable to utilize SNPs that affect the encoded protein.

[0279] For many of the SNPs disclosed in Tables 1-2 (which are identified as “Applera” SNP source), Tables 1-2 provide SNP allele frequencies obtained by re-sequencing the DNA of chromosomes from 39 individuals (Tables 1-2 also provide allele frequency information for “Celera” source SNPs and, where available, public SNPs from dbEST, HGBASE, and/or HGMD). The allele frequencies provided in Tables 1-2 enable these SNPs to be readily used for human identification applications. Although any SNP disclosed in Table 1 and/or Table 2 could be used for human identification, the closer that the frequency of the minor allele at a particular SNP site is to 50%, the greater the ability of that SNP to discriminate between different individuals in a population since it becomes increasingly likely that two randomly selected individuals would have different alleles at that SNP site. Using the SNP allele frequencies provided in Tables 1-2, one of ordinary skill in the art could readily select a subset of SNPs for which the frequency of the minor allele is, for example, at least 1%, 2%, 5%, 10%, 20%, 25%, 30%, 40%, 45%, or 50%, or any other frequency in-between. Thus, since Tables 1-2 provide allele frequencies based on the re-sequencing of the chromosomes from 39 individuals, a subset of SNPs could readily be selected for human identification in which the total allele count of the minor allele at a particular SNP site is, for example, at least 1, 2, 4, 8, 10, 16, 20, 24, 30, 32, 36, 38, 39, 40, or any other number in-between.

[0280] Furthermore, Tables 1-2 also provide population group (interchangeably referred to herein as ethnic or racial groups) information coupled with the extensive allele frequency information. For example, the group of 39 individuals whose DNA was re-sequenced was made-up of 20 Caucasians and 19 African-Americans. This population group information enables further refinement of SNP selection for human identification. For example, preferred SNPs for human identification can be selected from Tables 1-2 that have similar allele frequencies in both the Caucasian and African-American populations; thus, for example, SNPs can be selected that have equally high discriminatory power in both populations. Alternatively, SNPs can be selected for which there is a statistically significant difference in allele frequencies between the Caucasian and African-American populations (as an extreme example, a particular allele may be observed only in either the Caucasian or the African-American population group but not observed in the other population group); such SNPs are useful, for example, for predicting the race/ethnicity of an unknown perpetrator from a biological sample such as a hair or blood stain recovered at a crime scene. For a discussion of using SNPs to predict ancestry from a DNA sample, including statistical methods, see Frudakis et al., “A Classifier for the SNP-Based Inference of Ancestry”, Journal of Forensic Sciences 2003; 48(4):771-782.

[0281] SNPs have numerous advantages over other types of polymorphic markers, such as short tandem repeats (STRs). For example, SNPs can be easily scored and are amenable to automation, making SNPs the markers of choice for large-scale forensic databases. SNPs are found in much greater abundance throughout the genome than repeat polymorphisms. Population frequencies of two polymorphic forms can usually be determined with greater accuracy than those of multiple polymorphic forms at multi-allelic loci. SNPs are mutationaly more stable than repeat polymorphisms. SNPs are not susceptible to artefacts such as stutter bands that can hinder analysis. Stutter bands are frequently encountered when analyzing repeat polymorphisms, and are particularly troublesome when analyzing samples such as crime scene samples that may contain mixtures of DNA from multiple sources. Another significant advantage of SNP markers over STR markers is the much shorter length of nucleic acid needed to score a SNP. For example, STR markers are generally several hundred base pairs in length. A SNP, on the other hand, comprises a single nucleotide, and generally a short conserved region on either side of the SNP position for primer and/or probe binding. This makes SNPs more amenable to typing in highly degraded or aged biological samples that are frequently encountered in forensic casework in which DNA may be fragmented into short pieces.

[0282] SNPs also are not subject to microvariant and “off-ladder” alleles frequently encountered when analyzing STR loci. Microvariants are deletions or insertions within a repeat unit that change the size of the amplified DNA product so that the amplified product does not migrate at the same rate as reference alleles with normal sized repeat units. When separated by size, such as by electrophoresis on a polyacrylamide gel, microvariants do not align with a reference allelic ladder of standard sized repeat units, but rather migrate between the reference alleles. The reference allelic ladder is used for precise sizing of alleles for allele classification; therefore alleles that do not align with the reference allelic ladder lead to substantial analysis problems. Furthermore, when analyzing multi-allelic repeat polymorphisms, occasionally an allele is found that consists of more or less repeat units than has been previously seen in the population, or more or less repeat alleles than are included in a reference allelic ladder. These alleles will migrate outside the size range of known alleles in a reference allelic ladder, and therefore are referred to as “off-ladder” alleles. In extreme cases, the allele may contain so few or so many repeats that it migrates well out of the range of the reference allelic ladder. In this situation, the allele may not even be observed, or, with multiplex analysis, it may migrate within or close to the size range for another locus, further confounding analysis.

[0283] SNP analysis avoids the problems of microvariants and off-ladder alleles encountered in STR analysis. Importantly, microvariants and off-ladder alleles may provide significant problems, and may be completely missed, when using analysis methods such as oligonucleotide hybridization arrays, which utilize oligonucleotide probes specific for certain known alleles. Furthermore, off-ladder alleles and microvariants encountered with STR analysis, even when correctly typed, may lead to improper statistical analysis, since their frequencies in the population are generally unknown or poorly characterized, and therefore the statistical significance of a matching genotype may be questionable. All these advantages of SNP analysis are considerable in light of the consequences of most DNA identification cases, which may lead to life imprisonment for an individual, or re-association of remains to the family of a deceased individual.

[0284] DNA can be isolated from biological samples such as blood, bone, hair, saliva, or semen, and compared with the DNA from a reference source at particular SNP positions. Multiple SNP markers can be assayed simultaneously in order to increase the power of discrimination and the statistical significance of a matching genotype. For example, oligonucleotide arrays can be used to genotype a large number of SNPs simultaneously. The SNPs provided by the present invention can be assayed in combination with other polymorphic genetic markers, such as other SNPs known in the art or STRs, in order to identify an individual or to associate an individual with a particular biological sample.

[0285] Furthermore, the SNPs provided by the present invention can be genotyped for inclusion in a database of DNA genotypes, for example, a criminal DNA databank such as the FBI's Combined DNA Index System (CODIS) database. A genotype obtained from a biological sample of unknown source can then be queried against the database to find a matching genotype, with the SNPs of the present invention providing nucleotide positions at which to compare the known and unknown DNA sequences for identity. Accordingly, the present invention provides a database comprising novel SNPs or SNP alleles of the present invention (e.g., the database can comprise information indicating which alleles are possessed by individual members of a population at one or more novel SNP sites of the present invention), such as for use in forensics, biometrics, or other human identification applications. Such a database typically comprises a computer-based system in which the SNPs or SNP alleles of the present invention are recorded on a computer readable medium (see the section of the present specification entitled “Computer-Related Embodiments”).

[0286] The SNPs of the present invention can also be assayed for use in paternity testing. The object of paternity testing is usually to determine whether a male is the father of a child. In most cases, the mother of the child is known and thus, the mother's contribution to the child's genotype can be traced. Paternity testing investigates whether the part of the child's genotype not attributable to the mother is consistent with that of the putative father. Paternity testing can be performed by analyzing sets of polymorphisms in the putative father and the child, with the SNPs of the present invention providing nucleotide positions at which to compare the putative father's and child's DNA sequences for identity. If the set of polymorphisms in the child attributable to the father does not match the set of polymorphisms of the putative father, it can be concluded, barring experimental error, that the putative father is not the father of the child. If the set of polymorphisms in the child attributable to the father match the set of polymorphisms of the putative father, a statistical calculation can be performed to determine the probability of coincidental match, and a conclusion drawn as to the likelihood that the putative father is the true biological father of the child.

[0287] In addition to paternity testing, SNPs are also useful for other types of kinship testing, such as for verifying familial relationships for immigration purposes, or for cases in which an individual alleges to be related to a deceased individual in order to claim an inheritance from the deceased individual, etc. For further information regarding the utility of SNPs for paternity testing and other types of kinship testing, including methods for statistical analysis, see Krawczak, “Informativity assessment for biallelic single nucleotide polymorphisms”, Electrophoresis June 1999;20(8):1676-81.

[0288] The use of the SNPs of the present invention for human identification further extends to various authentication systems, commonly referred to as biometric systems, which typically convert physical characteristics of humans (or other organisms) into digital data. Biometric systems include various technological devices that measure such unique anatomical or physiological characteristics as finger, thumb, or palm prints; hand geometry; vein patterning on the back of the hand; blood vessel patterning of the retina and color and texture of the iris; facial characteristics; voice patterns; signature and typing dynamics; and DNA. Such physiological measurements can be used to verify identity and, for example, restrict or allow access based on the identification. Examples of applications for biometrics include physical area security, computer and network security, aircraft passenger check-in and boarding, financial transactions, medical records access, government benefit distribution, voting, law enforcement, passports, visas and immigration, prisons, various military applications, and for restricting access to expensive or dangerous items, such as automobiles or guns (see, for example, O'Connor, Stanford Technology Law Review and U.S. Pat. No. 6,119,096).

[0289] Groups of SNPs, particularly the SNPs provided by the present invention, can be typed to uniquely identify an individual for biometric applications such as those described above. Such SNP typing can readily be accomplished using, for example, DNA chips/arrays. Preferably, a minimally invasive means for obtaining a DNA sample is utilized. For example, PCR amplification enables sufficient quantities of DNA for analysis to be obtained from buccal swabs or fingerprints, which contain DNA-containing skin cells and oils that are naturally transferred during contact.

[0290] Further information regarding techniques for using SNPs in forensic/human identification applications can be found in, for example, Current Protocols in Human Genetics, John Wiley & Sons, N.Y. (2002), 14.1-14.7.

### Variant Proteins, Antibodies, Vectors & Host Cells, & Uses Thereof

[0291] Variant Proteins Encoded by SNP-Containing Nucleic Acid Molecules

[0292] The present invention provides SNP-containing nucleic acid molecules, many of which encode proteins having variant amino acid sequences as compared to the art-known (i.e., wild-type) proteins. Amino acid sequences encoded by the polymorphic nucleic acid molecules of the present invention are provided as SEQ ID NOS:30-58 in Table 1 and the Sequence Listing. These variants will generally be referred to herein as variant proteins/peptides/polypeptides, or polymorphic proteins/peptides/polypeptides of the present invention. The terms “protein”, “peptide”, and “polypeptide” are used herein interchangeably.

[0293] A variant protein of the present invention may be encoded by, for example, a nonsynonymous nucleotide substitution at any one of the cSNP positions disclosed herein. In addition, variant proteins may also include proteins whose expression, structure, and/or function is altered by a SNP disclosed herein, such as a SNP that creates or destroys a stop codon, a SNP that affects splicing, and a SNP in control/regulatory elements, e.g. promoters, enhancers, or transcription factor binding domains.

[0294] As used herein, a protein or peptide is said to be “isolated” or “purified” when it is substantially free of cellular material or chemical precursors or other chemicals. The variant proteins of the present invention can be purified to homogeneity or other lower degrees of purity. The level of purification will be based on the intended use. The key feature is that the preparation allows for the desired function of the variant protein, even if in the presence of considerable amounts of other components.

[0295] As used herein, “substantially free of cellular material” includes preparations of the variant protein having less than about 30% (by dry weight) other proteins (i.e., contaminating protein), less than about 20% other proteins, less than about 10% other proteins, or less than about 5% other proteins. When the variant protein is recombinantly produced, it can also be substantially free of culture medium, i.e., culture medium represents less than about 20% of the volume of the protein preparation.

[0296] The language “substantially free of chemical precursors or other chemicals” includes preparations of the variant protein in which it is separated from chemical precursors or other chemicals that are involved in its synthesis. In one embodiment, the language “substantially free of chemical precursors or other chemicals” includes preparations of the variant protein having less than about 30% (by dry weight) chemical precursors or other chemicals, less than about 20% chemical precursors or other chemicals, less than about 10% chemical precursors or other chemicals, or less than about 5% chemical precursors or other chemicals.

[0297] An isolated variant protein may be purified from cells that naturally express it, purified from cells that have been altered to express it (recombinant host cells), or synthesized using known protein synthesis methods. For example, a nucleic acid molecule containing SNP(s) encoding the variant protein can be cloned into an expression vector, the expression vector introduced into a host cell, and the variant protein expressed in the host cell. The variant protein can then be isolated from the cells by any appropriate purification scheme using standard protein purification techniques. Examples of these techniques are described in detail below (Sambrook and Russell, 2000, Molecular Cloning: A Laboratory Manual, Cold Spring Harbor Laboratory Press, Cold Spring Harbor, N.Y.).

[0298] The present invention provides isolated variant proteins that comprise, consist of or consist essentially of amino acid sequences that contain one or more variant amino acids encoded by one or more codons which contain a SNP of the present invention.

[0299] Accordingly, the present invention provides variant proteins that consist of amino acid sequences that contain one or more amino acid polymorphisms (or truncations or extensions due to creation or destruction of a stop codon, respectively) encoded by the SNPs provided in Table 1 and/or Table 2. A protein consists of an amino acid sequence when the amino acid sequence is the entire amino acid sequence of the protein.

[0300] The present invention further provides variant proteins that consist essentially of amino acid sequences that contain one or more amino acid polymorphisms (or truncations or extensions due to creation or destruction of a stop codon, respectively) encoded by the SNPs provided in Table 1 and/or Table 2. A protein consists essentially of an amino acid sequence when such an amino acid sequence is present with only a few additional amino acid residues in the final protein.

[0301] The present invention further provides variant proteins that comprise amino acid sequences that contain one or more amino acid polymorphisms (or truncations or extensions due to creation or destruction of a stop codon, respectively) encoded by the SNPs provided in Table 1 and/or Table 2. A protein comprises an amino acid sequence when the amino acid sequence is at least part of the final amino acid sequence of the protein. In such a fashion, the protein may contain only the variant amino acid sequence or have additional amino acid residues, such as a contiguous encoded sequence that is naturally associated with it or heterologous amino acid residues. Such a protein can have a few additional amino acid residues or can comprise many more additional amino acids. A brief description of how various types of these proteins can be made and isolated is provided below.

[0302] The variant proteins of the present invention can be attached to heterologous sequences to form chimeric or fusion proteins. Such chimeric and fusion proteins comprise a variant protein operatively linked to a heterologous protein having an amino acid sequence not substantially homologous to the variant protein. “Operatively linked” indicates that the coding sequences for the variant protein and the heterologous protein are ligated in-frame. The heterologous protein can be fused to the N-terminus or C-terminus of the variant protein. In another embodiment, the fusion protein is encoded by a fusion polynucleotide that is synthesized by conventional techniques including automated DNA synthesizers. Alternatively, PCR amplification of gene fragments can be carried out using anchor primers which give rise to complementary overhangs between two consecutive gene fragments which can subsequently be annealed and re-amplified to generate a chimeric gene sequence (see Ausubel et al., Current Protocols in Molecular Biology, 1992). Moreover, many expression vectors are commercially available that already encode a fusion moiety (e.g., a GST protein). A variant protein-encoding nucleic acid can be cloned into such an expression vector such that the fusion moiety is linked in-frame to the variant protein.

[0303] In many uses, the fusion protein does not affect the activity of the variant protein. The fusion protein can include, but is not limited to, enzymatic fusion proteins, for example, beta-galactosidase fusions, yeast two-hybrid GAL fusions, poly-His fusions, MYC-tagged, HI-tagged and Ig fusions. Such fusion proteins, particularly poly-His fusions, can facilitate their purification following recombinant expression. In certain host cells (e.g., mammalian host cells), expression and/or secretion of a protein can be increased by using a heterologous signal sequence. Fusion proteins are further described in, for example, Terpe, “Overview of tag protein fusions: from molecular and biochemical fundamentals to commercial systems”, Appl Microbiol Biotechnol. January 2003;60(5):523-33. Epub Nov. 7, 2002; Graddis et al., “Designing proteins that work using recombinant technologies”, Curr Pharm Biotechnol. December 2002;3(4):285-97; and Nilsson et al., “Affinity fusion strategies for detection, purification, and immobilization of recombinant proteins”, Protein Expr Purif. October 1997;11(1): 1-16.

[0304] The present invention also relates to further obvious variants of the variant polypeptides of the present invention, such as naturally-occurring mature forms (e.g., alleleic variants), non-naturally occurring recombinantly-derived variants, and orthologs and paralogs of such proteins that share sequence homology. Such variants can readily be generated using art-known techniques in the fields of recombinant nucleic acid technology and protein biochemistry. It is understood, however, that variants exclude those known in the prior art before the present invention.

[0305] Further variants of the variant polypeptides disclosed in Table 1 can comprise an amino acid sequence that shares at least 70-80%, 80-85%, 85-90%, 91%, 92%, 93%, 94%, 95%, 96%, 97%, 98%, or 99% sequence identity with an amino acid sequence disclosed in Table 1 (or a fragment thereof) and that includes a novel amino acid residue (allele) disclosed in Table 1 (which is encoded by a novel SNP allele). Thus, an aspect of the present invention that is specifically contemplated are polypeptides that have a certain degree of sequence variation compared with the polypeptide sequences shown in Table 1, but that contain a novel amino acid residue (allele) encoded by a novel SNP allele disclosed herein. In other words, as long as a polypeptide contains a novel amino acid residue disclosed herein, other portions of the polypeptide that flank the novel amino acid residue can vary to some degree from the polypeptide sequences shown in Table 1.

[0306] Full-length pre-processed forms, as well as mature processed forms, of proteins that comprise one of the amino acid sequences disclosed herein can readily be identified as having complete sequence identity to one of the variant proteins of the present invention as well as being encoded by the same genetic locus as the variant proteins provided herein.

[0307] Orthologs of a variant peptide can readily be identified as having some degree of significant sequence homology/identity to at least a portion of a variant peptide as well as being encoded by a gene from another organism. Preferred orthologs will be isolated from non-human mammals, preferably primates, for the development of human therapeutic targets and agents. Such orthologs can be encoded by a nucleic acid sequence that hybridizes to a variant peptide-encoding nucleic acid molecule under moderate to stringent conditions depending on the degree of relatedness of the two organisms yielding the homologous proteins.

[0308] Variant proteins include, but are not limited to, proteins containing deletions, additions and substitutions in the amino acid sequence caused by the SNPs of the present invention. One class of substitutions is conserved amino acid substitutions in which a given amino acid in a polypeptide is substituted for another amino acid of like characteristics. Typical conservative substitutions are replacements, one for another, among the aliphatic amino acids Ala, Val, Leu, and Ile; interchange of the hydroxyl residues Ser and Thr; exchange of the acidic residues Asp and Glu; substitution between the amide residues Asn and Gln; exchange of the basic residues Lys and Arg; and replacements among the aromatic residues Phe and Tyr. Guidance concerning which amino acid changes are likely to be phenotypically silent are found in, for example, Bowie et al., Science 247:1306-1310 (1990).

[0309] Variant proteins can be fully functional or can lack function in one or more activities, e.g. ability to bind another molecule, ability to catalyze a substrate, ability to mediate signaling, etc. Fully functional variants typically contain only conservative variations or variations in non-critical residues or in non-critical regions. Functional variants can also contain substitution of similar amino acids that result in no change or an insignificant change in function. Alternatively, such substitutions may positively or negatively affect function to some degree. Non-functional variants typically contain one or more non-conservative amino acid substitutions, deletions, insertions, inversions, truncations or extensions, or a substitution, insertion, inversion, or deletion of a critical residue or in a critical region.

[0310] Amino acids that are essential for function of a protein can be identified by methods known in the art, such as site-directed mutagenesis or alanine-scanning mutagenesis (Cunningham et al., Science 244:1081-1085 (1989)), particularly using the amino acid sequence and polymorphism information provided in Table 1. The latter procedure introduces single alanine mutations at every residue in the molecule. The resulting mutant molecules are then tested for biological activity such as enzyme activity or in assays such as an in vitro proliferative activity. Sites that are critical for binding partner/substrate binding can also be determined by structural analysis such as crystallization, nuclear magnetic resonance or photoaffinity labeling (Smith et al., J. Mol. Biol. 224:899-904 (1992); de Vos et al. Science 255:306-312 (1992)).

[0311] Polypeptides can contain amino acids other than the 20 amino acids commonly referred to as the 20 naturally occurring amino acids. Further, many amino acids, including the terminal amino acids, may be modified by natural processes, such as processing and other post-translational modifications, or by chemical modification techniques well known in the art. Accordingly, the variant proteins of the present invention also encompass derivatives or analogs in which a substituted amino acid residue is not one encoded by the genetic code, in which a substituent group is included, in which the mature polypeptide is fused with another compound, such as a compound to increase the half-life of the polypeptide (e.g., polyethylene glycol), or in which additional amino acids are fused to the mature polypeptide, such as a leader or secretory sequence or a sequence for purification of the mature polypeptide or a pro-protein sequence.

[0312] Known protein modifications include, but are not limited to, acetylation, acylation, ADP-ribosylation, amidation, covalent attachment of flavin, covalent attachment of a heme moiety, covalent attachment of a nucleotide or nucleotide derivative, covalent attachment of a lipid or lipid derivative, covalent attachment of phosphotidylinositol, cross-linking, cyclization, disulfide bond formation, demethylation, formation of covalent crosslinks, formation of cystine, formation of pyroglutamate, formylation, gamma carboxylation, glycosylation, GPI anchor formation, hydroxylation, iodination, methylation, myristoylation, oxidation, proteolytic processing, phosphorylation, prenylation, racemization, selenoylation, sulfation, transfer-RNA mediated addition of amino acids to proteins such as arginylation, and ubiquitination.

[0313] Such protein modifications are well known to those of skill in the art and have been described in great detail in the scientific literature. Several particularly common modifications, glycosylation, lipid attachment, sulfation, gamma-carboxylation of glutamic acid residues, hydroxylation and ADP-ribosylation, for instance, are described in most basic texts, such as Proteins—Structure and Molecular Properties, 2nd Ed., T. E. Creighton, W.H. Freeman and Company, New York (1993); Wold, F., Posttranslational Covalent Modification of Proteins, B. C. Johnson, Ed., Academic Press, New York 1-12 (1983); Seifter et al., Meth. Enzymol. 182: 626-646 (1990); and Rattan et al., Ann. N.Y. Acad. Sci. 663:48-62 (1992).

[0314] The present invention further provides fragments of the variant proteins in which the fragments contain one or more amino acid sequence variations (e.g., substitutions, or truncations or extensions due to creation or destruction of a stop codon) encoded by one or more SNPs disclosed herein. The fragments to which the invention pertains, however, are not to be construed as encompassing fragments that have been disclosed in the prior art before the present invention.

[0315] As used herein, a fragment may comprise at least about 4, 8, 10, 12, 14, 16, 18, 20, 25, 30, 50, 100 (or any other number in-between) or more contiguous amino acid residues from a variant protein, wherein at least one amino acid residue is affected by a SNP of the present invention, e.g., a variant amino acid residue encoded by a nonsynonymous nucleotide substitution at a cSNP position provided by the present invention. The variant amino acid encoded by a cSNP may occupy any residue position along the sequence of the fragment. Such fragments can be chosen based on the ability to retain one or more of the biological activities of the variant protein or the ability to perform a function, e.g., act as an immunogen. Particularly important fragments are biologically active fragments. Such fragments will typically comprise a domain or motif of a variant protein of the present invention, e.g., active site, transmembrane domain, or ligand/substrate binding domain. Other fragments include, but are not limited to, domain or motif-containing fragments, soluble peptide fragments, and fragments containing immunogenic structures. Predicted domains and functional sites are readily identifiable by computer programs well known to those of skill in the art (e.g., PROSITE analysis) (Current Protocols in Protein Science, John Wiley & Sons, N.Y. (2002)).

[0316] Uses of Variant Proteins

[0317] The variant proteins of the present invention can be used in a variety of ways, including but not limited to, in assays to determine the biological activity of a variant protein, such as in a panel of multiple proteins for high-throughput screening; to raise antibodies or to elicit another type of immune response; as a reagent (including the labeled reagent) in assays designed to quantitatively determine levels of the variant protein (or its binding partner) in biological fluids; as a marker for cells or tissues in which it is preferentially expressed (either constitutively or at a particular stage of tissue differentiation or development or in a disease state); as a target for screening for a therapeutic agent; and as a direct therapeutic agent to be administered into a human subject. Any of the variant proteins disclosed herein may be developed into reagent grade or kit format for commercialization as research products. Methods for performing the uses listed above are well known to those skilled in the art (see, e.g., Molecular Cloning: A Laboratory Manual, Cold Spring Harbor Laboratory Press, Sambrook and Russell, 2000, and Methods in Enzymology: Guide to Molecular Cloning Techniques, Academic Press, Berger, S. L. and A. R. Kimmel eds., 1987).

[0318] In a specific embodiment of the invention, the methods of the present invention include detection of one or more variant proteins disclosed herein. Variant proteins are disclosed in Table 1 and in the Sequence Listing as SEQ ID NOS: 30-58. Detection of such proteins can be accomplished using, for example, antibodies, small molecule compounds, aptamers, ligands/substrates, other proteins or protein fragments, or other protein-binding agents. Preferably, protein detection agents are specific for a variant protein of the present invention and can therefore discriminate between a variant protein of the present invention and the wild-type protein or another variant form. This can generally be accomplished by, for example, selecting or designing detection agents that bind to the region of a protein that differs between the variant and wild-type protein, such as a region of a protein that contains one or more amino acid substitutions that is/are encoded by a non-synonymous cSNP of the present invention, or a region of a protein that follows a nonsense mutation-type SNP that creates a stop codon thereby leading to a shorter polypeptide, or a region of a protein that follows a read-through mutation-type SNP that destroys a stop codon thereby leading to a longer polypeptide in which a portion of the polypeptide is present in one version of the polypeptide but not the other.

[0319] In another specific aspect of the invention, the variant proteins of the present invention are used as targets for diagnosing myocardial infarction or for determining predisposition to myocardial infarction in a human. Accordingly, the invention provides methods for detecting the presence of, or levels of, one or more variant proteins of the present invention in a cell, tissue, or organism. Such methods typically involve contacting a test sample with an agent (e.g., an antibody, small molecule compound, or peptide) capable of interacting with the variant protein such that specific binding of the agent to the variant protein can be detected. Such an assay can be provided in a single detection format or a multi-detection format such as an array, for example, an antibody or aptamer array (arrays for protein detection may also be referred to as “protein chips”). The variant protein of interest can be isolated from a test sample and assayed for the presence of a variant amino acid sequence encoded by one or more SNPs disclosed by the present invention. The SNPs may cause changes to the protein and the corresponding protein function/activity, such as through non-synonymous substitutions in protein coding regions that can lead to amino acid substitutions, deletions, insertions, and/or rearrangements; formation or destruction of stop codons; or alteration of control elements such as promoters. SNPs may also cause inappropriate post-translational modifications.

[0320] One preferred agent for detecting a variant protein in a sample is an antibody capable of selectively binding to a variant form of the protein (antibodies are described in greater detail in the next section). Such samples include, for example, tissues, cells, and biological fluids isolated from a subject, as well as tissues, cells and fluids present within a subject.

[0321] In vitro methods for detection of the variant proteins associated with myocardial infarction that are disclosed herein and fragments thereof include, but are not limited to, enzyme linked immunosorbent assays (ELISAs), radioimmunoassays (RIA), Western blots, immunoprecipitations, immunofluorescence, and protein arrays/chips (e.g., arrays of antibodies or aptamers). For further information regarding immunoassays and related protein detection methods, see Current Protocols in Immunology, John Wiley & Sons, N.Y., and Hage, “Immunoassays”, Anal Chem. Jun. 15, 1999;71(12):294R-304R.

[0322] Additional analytic methods of detecting amino acid variants include, but are not limited to, altered electrophoretic mobility, altered tryptic peptide digest, altered protein activity in cell-based or cell-free assay, alteration in ligand or antibody-binding pattern, altered isoelectric point, and direct amino acid sequencing.

[0323] Alternatively, variant proteins can be detected in vivo in a subject by introducing into the subject a labeled antibody (or other type of detection reagent) specific for a variant protein. For example, the antibody can be labeled with a radioactive marker whose presence and location in a subject can be detected by standard imaging techniques.

[0324] Other uses of the variant peptides of the present invention are based on the class or action of the protein. For example, proteins isolated from humans and their mammalian orthologs serve as targets for identifying agents (e.g., small molecule drugs or antibodies) for use in therapeutic applications, particularly for modulating a biological or pathological response in a cell or tissue that expresses the protein. Pharmaceutical agents can be developed that modulate protein activity.

[0325] As an alternative to modulating gene expression, therapeutic compounds can be developed that modulate protein function. For example, many SNPs disclosed herein affect the amino acid sequence of the encoded protein (e.g., non-synonymous cSNPs and nonsense mutation-type SNPs). Such alterations in the encoded amino acid sequence may affect protein function, particularly if such amino acid sequence variations occur in functional protein domains, such as catalytic domains, ATP-binding domains, or ligand/substrate binding domains. It is well established in the art that variant proteins having amino acid sequence variations in functional domains can cause or influence pathological conditions. In such instances, compounds (e.g., small molecule drugs or antibodies) can be developed that target the variant protein and modulate (e.g., up- or down-regulate) protein function/activity.

[0326] The therapeutic methods of the present invention further include methods that target one or more variant proteins of the present invention. Variant proteins can be targeted using, for example, small molecule compounds, antibodies, aptamers, ligands/substrates, other proteins, or other protein-binding agents. Additionally, the skilled artisan will recognize that the novel protein variants (and polymorphic nucleic acid molecules) disclosed in Table 1 may themselves be directly used as therapeutic agents by acting as competitive inhibitors of corresponding art-known proteins (or nucleic acid molecules such as mRNA molecules).

[0327] The variant proteins of the present invention are particularly useful in drug screening assays, in cell-based or cell-free systems. Cell-based systems can utilize cells that naturally express the protein, a biopsy specimen, or cell cultures. In one embodiment, cell-based assays involve recombinant host cells expressing the variant protein. Cell-free assays can be used to detect the ability of a compound to directly bind to a variant protein or to the corresponding SNP-containing nucleic acid fragment that encodes the variant protein.

[0328] A variant protein of the present invention, as well as appropriate fragments thereof, can be used in high-throughput screening assays to test candidate compounds for the ability to bind and/or modulate the activity of the variant protein. These candidate compounds can be further screened against a protein having normal function (e.g., a wild-type/non-variant protein) to further determine the effect of the compound on the protein activity. Furthermore, these compounds can be tested in animal or invertebrate systems to determine in vivo activity/effectiveness. Compounds can be identified that activate (agonists) or inactivate (antagonists) the variant protein, and different compounds can be identified that cause various degrees of activation or inactivation of the variant protein.

[0329] Further, the variant proteins can be used to screen a compound for the ability to stimulate or inhibit interaction between the variant protein and a target molecule that normally interacts with the protein. The target can be a ligand, a substrate or a binding partner that the protein normally interacts with (for example, epinephrine or norepinephrine). Such assays typically include the steps of combining the variant protein with a candidate compound under conditions that allow the variant protein, or fragment thereof, to interact with the target molecule, and to detect the formation of a complex between the protein and the target or to detect the biochemical consequence of the interaction with the variant protein and the target, such as any of the associated effects of signal transduction.

[0330] Candidate compounds include, for example, 1) peptides such as soluble peptides, including Ig-tailed fusion peptides and members of random peptide libraries (see, e.g., Lam et al., Nature 354:82-84 (1991); Houghten et al., Nature 354:84-86 (1991)) and combinatorial chemistry-derived molecular libraries made of D- and/or L-configuration amino acids; 2) phosphopeptides (e.g., members of random and partially degenerate, directed phosphopeptide libraries, see, e.g., Songyang et al., Cell 72:767-778 (1993)); 3) antibodies (e.g., polyclonal, monoclonal, humanized, anti-idiotypic, chimeric, and single chain antibodies as well as Fab, F(ab′)₂, Fab expression library fragments, and epitope-binding fragments of antibodies); and 4) small organic and inorganic molecules (e.g., molecules obtained from combinatorial and natural product libraries).

[0331] One candidate compound is a soluble fragment of the variant protein that competes for ligand binding. Other candidate compounds include mutant proteins or appropriate fragments containing mutations that affect variant protein function and thus compete for ligand. Accordingly, a fragment that competes for ligand, for example with a higher affinity, or a fragment that binds ligand but does not allow release, is encompassed by the invention.

[0332] The invention further includes other end point assays to identify compounds that modulate (stimulate or inhibit) variant protein activity. The assays typically involve an assay of events in the signal transduction pathway that indicate protein activity. Thus, the expression of genes that are up or down-regulated in response to the variant protein dependent signal cascade can be assayed. In one embodiment, the regulatory region of such genes can be operably linked to a marker that is easily detectable, such as luciferase. Alternatively, phosphorylation of the variant protein, or a variant protein target, could also be measured. Any of the biological or biochemical functions mediated by the variant protein can be used as an endpoint assay. These include all of the biochemical or biological events described herein, in the references cited herein, incorporated by reference for these endpoint assay targets, and other functions known to those of ordinary skill in the art.

[0333] Binding and/or activating compounds can also be screened by using chimeric variant proteins in which an amino terminal extracellular domain or parts thereof, an entire transmembrane domain or subregions, and/or the carboxyl terminal intracellular domain or parts thereof, can be replaced by heterologous domains or subregions. For example, a substrate-binding region can be used that interacts with a different substrate than that which is normally recognized by a variant protein. Accordingly, a different set of signal transduction components is available as an end-point assay for activation. This allows for assays to be performed in other than the specific host cell from which the variant protein is derived.

[0334] The variant proteins are also useful in competition binding assays in methods designed to discover compounds that interact with the variant protein. Thus, a compound can be exposed to a variant protein under conditions that allow the compound to bind or to otherwise interact with the variant protein. A binding partner, such as ligand, that normally interacts with the variant protein is also added to the mixture. If the test compound interacts with the variant protein or its binding partner, it decreases the amount of complex formed or activity from the variant protein. This type of assay is particularly useful in screening for compounds that interact with specific regions of the variant protein (Hodgson, Bio/technology, Sep. 10, 1992(9), 973-80).

[0335] To perform cell-free drug screening assays, it is sometimes desirable to immobilize either the variant protein or a fragment thereof, or its target molecule, to facilitate separation of complexes from uncomplexed forms of one or both of the proteins, as well as to accommodate automation of the assay. Any method for immobilizing proteins on matrices can be used in drug screening assays. In one embodiment, a fusion protein containing an added domain allows the protein to be bound to a matrix. For example, glutathione-S-transferase/¹²⁵I fusion proteins can be adsorbed onto glutathione sepharose beads (Sigma Chemical, St. Louis, Mo.) or glutathione derivatized microtitre plates, which are then combined with the cell lysates (e.g., ³⁵S-labeled) and a candidate compound, such as a drug candidate, and the mixture incubated under conditions conducive to complex formation (e.g., at physiological conditions for salt and pH). Following incubation, the beads can be washed to remove any unbound label, and the matrix immobilized and radiolabel determined directly, or in the supernatant after the complexes are dissociated. Alternatively, the complexes can be dissociated from the matrix, separated by SDS-PAGE, and the level of bound material found in the bead fraction quantitated from the gel using standard electrophoretic techniques.

[0336] Either the variant protein or its target molecule can be immobilized utilizing conjugation of biotin and streptavidin. Alternatively, antibodies reactive with the variant protein but which do not interfere with binding of the variant protein to its target molecule can be derivatized to the wells of the plate, and the variant protein trapped in the wells by antibody conjugation. Preparations of the target molecule and a candidate compound are incubated in the variant protein-presenting wells and the amount of complex trapped in the well can be quantitated. Methods for detecting such complexes, in addition to those described above for the GST-immobilized complexes, include immunodetection of complexes using antibodies reactive with the protein target molecule, or which are reactive with variant protein and compete with the target molecule, and enzyme-linked assays that rely on detecting an enzymatic activity associated with the target molecule.

[0337] Modulators of variant protein activity identified according to these drug screening assays can be used to treat a subject with a disorder mediated by the protein pathway, such as myocardial infarction. These methods of treatment typically include the steps of administering the modulators of protein activity in a pharmaceutical composition to a subject in need of such treatment.

[0338] The variant proteins, or fragments thereof, disclosed herein can themselves be directly used to treat a disorder characterized by an absence of, inappropriate, or unwanted expression or activity of the variant protein. Accordingly, methods for treatment include the use of a variant protein disclosed herein or fragments thereof.

[0339] In yet another aspect of the invention, variant proteins can be used as “bait proteins” in a two-hybrid assay or three-hybrid assay (see, e.g., U.S. Pat. No. 5,283,317; Zervos et al. (1993) Cell 72:223-232; Madura et al. (1993) J. Biol. Chem. 268:12046-12054; Bartel et al. (1993) Biotechniques 14:920-924; Iwabuchi et al. (1993) Oncogene 8:1693-1696; and Brent WO94/10300) to identify other proteins that bind to or interact with the variant protein and are involved in variant protein activity. Such variant protein-binding proteins are also likely to be involved in the propagation of signals by the variant proteins or variant protein targets as, for example, elements of a protein-mediated signaling pathway. Alternatively, such variant protein-binding proteins are inhibitors of the variant protein.

[0340] The two-hybrid system is based on the modular nature of most transcription factors, which typically consist of separable DNA-binding and activation domains. Briefly, the assay typically utilizes two different DNA constructs. In one construct, the gene that codes for a variant protein is fused to a gene encoding the DNA binding domain of a known transcription factor (e.g., GAL-4). In the other construct, a DNA sequence, from a library of DNA sequences, that encodes an unidentified protein (“prey” or “sample”) is fused to a gene that codes for the activation domain of the known transcription factor. If the “bait” and the “prey” proteins are able to interact, in vivo, forming a variant protein-dependent complex, the DNA-binding and activation domains of the transcription factor are brought into close proximity. This proximity allows transcription of a reporter gene (e.g., LacZ) that is operably linked to a transcriptional regulatory site responsive to the transcription factor. Expression of the reporter gene can be detected, and cell colonies containing the functional transcription factor can be isolated and used to obtain the cloned gene that encodes the protein that interacts with the variant protein.

[0341] Antibodies Directed to Variant Proteins

[0342] The present invention also provides antibodies that selectively bind to the variant proteins disclosed herein and fragments thereof. Such antibodies may be used to quantitatively or qualitatively detect the variant proteins of the present invention. As used herein, an antibody selectively binds a target variant protein when it binds the variant protein and does not significantly bind to non-variant proteins, i.e., the antibody does not significantly bind to normal, wild-type, or art-known proteins that do not contain a variant amino acid sequence due to one or more SNPs of the present invention (variant amino acid sequences may be due to, for example, nonsynonymous cSNPs, nonsense SNPs that create a stop codon, thereby causing a truncation of a polypeptide or SNPs that cause read-through mutations resulting in an extension of a polypeptide).

[0343] As used herein, an antibody is defined in terms consistent with that recognized in the art: they are multi-subunit proteins produced by an organism in response to an antigen challenge. The antibodies of the present invention include both monoclonal antibodies and polyclonal antibodies, as well as antigen-reactive proteolytic fragments of such antibodies, such as Fab, F(ab)′₂, and Fv fragments. In addition, an antibody of the present invention further includes any of a variety of engineered antigen-binding molecules such as a chimeric antibody (U.S. Pat. Nos. 4,816,567 and 4,816,397; Morrison et al., Proc. Natl. Acad. Sci. USA, 81:6851, 1984; Neuberger et al., Nature 312:604, 1984), a humanized antibody (U.S. Pat. Nos. 5,693,762; 5,585,089; and 5,565,332), a single-chain Fv (U.S. Pat. No. 4,946,778; Ward et al., Nature 334:544, 1989), a bispecific antibody with two binding specificities (Segal et al., J. Immunol. Methods 248:1, 2001; Carter, J. Immunol. Methods 248:7, 2001), a diabody, a triabody, and a tetrabody (Todorovska et al., J. Immunol. Methods, 248:47, 2001), as well as a Fab conjugate (dimer or trimer), and a minibody.

[0344] Many methods are known in the art for generating and/or identifying antibodies to a given target antigen (Harlow, Antibodies, Cold Spring Harbor Press, (1989)). In general, an isolated peptide (e.g., a variant protein of the present invention) is used as an immunogen and is administered to a mammalian organism, such as a rat, rabbit, hamster or mouse. Either a full-length protein, an antigenic peptide fragment (e.g., a peptide fragment containing a region that varies between a variant protein and a corresponding wild-type protein), or a fusion protein can be used. A protein used as an immunogen may be naturally-occurring, synthetic or recombinantly produced, and may be administered in combination with an adjuvant, including but not limited to, Freund's (complete and incomplete), mineral gels such as aluminum hydroxide, surface active substance such as lysolecithin, pluronic polyols, polyanions, peptides, oil emulsions, keyhole limpet hemocyanin, dinitrophenol, and the like.

[0345] Monoclonal antibodies can be produced by hybridoma technology (Kohler and Milstein, Nature, 256:495, 1975), which immortalizes cells secreting a specific monoclonal antibody. The immortalized cell lines can be created in vitro by fusing two different cell types, typically lymphocytes, and tumor cells. The hybridoma cells may be cultivated in vitro or in vivo. Additionally, fully human antibodies can be generated by transgenic animals (He et al., J. Immunol., 169:595, 2002). Fd phage and Fd phagemid technologies may be used to generate and select recombinant antibodies in vitro (Hoogenboom and Chames, Immunol. Today 21:371, 2000; Liu et aL, J. Mol. Biol. 315:1063, 2002). The complementarity-determining regions of an antibody can be identified, and synthetic peptides corresponding to such regions may be used to mediate antigen binding (U.S. Pat. No. 5,637,677).

[0346] Antibodies are preferably prepared against regions or discrete fragments of a variant protein containing a variant amino acid sequence as compared to the corresponding wild-type protein (e.g., a region of a variant protein that includes an amino acid encoded by a nonsynonymous cSNP, a region affected by truncation caused by a nonsense SNP that creates a stop codon, or a region resulting from the destruction of a stop codon due to read-through mutation caused by a SNP). Furthermore, preferred regions will include those involved in function/activity and/or protein/binding partner interaction. Such fragments can be selected on a physical property, such as fragments corresponding to regions that are located on the surface of the protein, e.g., hydrophilic regions, or can be selected based on sequence uniqueness, or based on the position of the variant amino acid residue(s) encoded by the SNPs provided by the present invention. An antigenic fragment will typically comprise at least about 8-10 contiguous amino acid residues in which at least one of the amino acid residues is an amino acid affected by a SNP disclosed herein. The antigenic peptide can comprise, however, at least 12, 14, 16, 20, 25, 50, 100 (or any other number in-between) or more amino acid residues, provided that at least one amino acid is affected by a SNP disclosed herein.

[0347] Detection of an antibody of the present invention can be facilitated by coupling (i.e., physically linking) the antibody or an antigen-reactive fragment thereof to a detectable substance. Detectable substances include, but are not limited to, various enzymes, prosthetic groups, fluorescent materials, luminescent materials, bioluminescent materials, and radioactive materials. Examples of suitable enzymes include horseradish peroxidase, alkaline phosphatase, β-galactosidase, or acetylcholinesterase; examples of suitable prosthetic group complexes include streptavidin/biotin and avidin/biotin; examples of suitable fluorescent materials include umbelliferone, fluorescein, fluorescein isothiocyanate, rhodamine, dichlorotriazinylamine fluorescein, dansyl chloride or phycoerythrin; an example of a luminescent material includes luminol; examples of bioluminescent materials include luciferase, luciferin, and aequorin, and examples of suitable radioactive material include ¹²⁵I, ¹³¹I, ³⁵S or ³H.

[0348] Antibodies, particularly the use of antibodies as therapeutic agents, are reviewed in: Morgan, “Antibody therapy for Alzheimer's disease”, Expert Rev Vaccines. February 2003;2(1):53-9; Ross et al., “Anticancer antibodies”, Am J Clin Pathol. April 2003;119(4):472-85; Goldenberg, “Advancing role of radiolabeled antibodies in the therapy of cancer”, Cancer Immunol Immunother. May 2003;52(5):281-96. Epub Mar. 11, 2003; Ross et al., “Antibody-based therapeutics in oncology”, Expert Rev Anticancer Ther. February 2003;3(1):107-21; Cao et al., “Bispecific antibody conjugates in therapeutics”, Adv Drug Deliv Rev. Feb. 10, 2003;55(2):171-97; von Mehren et al., “Monoclonal antibody therapy for cancer”, Annu Rev Med. 2003;54:343-69. Epub Dec. 3, 2001; Hudson et al., “Engineered antibodies”, Nat Med. January 2003;9(1):129-34; Brekke et al., “Therapeutic antibodies for human diseases at the dawn of the twenty-first century”, Nat Rev Drug Discov. January 2003;2(1):52-62 (Erratum in: Nat Rev Drug Discov. March 2003;2(3):240); Houdebine, “Antibody manufacture in transgenic animals and comparisons with other systems“, Curr Opin Biotechnol. December 2002;13(6):625-9; Andreakos et al., “Monoclonal antibodies in immune and inflammatory diseases”, Curr Opin Biotechnol. December 2002;13(6):615-20; Kellermann et al., “Antibody discovery: the use of transgenic mice to generate human monoclonal antibodies for therapeutics”, Curr Opin Biotechnol. December 2002;13(6):593-7; Pini et al., “Phage display and colony filter screening for high-throughput selection of antibody libraries”, Comb Chem High Throughput Screen. November 2002;5(7):503-10; Batra et al., “Pharmacokinetics and biodistribution of genetically engineered antibodies”, Curr Opin Biotechnol. December 2002;13(6):603-8; and Tangri et al., “Rationally engineered proteins or antibodies with absent or reduced immunogenicity”, Curr Med Chem. December 2002;9(24):2191-9.

[0349] Uses of Antibodies

[0350] Antibodies can be used to isolate the variant proteins of the present invention from a natural cell source or from recombinant host cells by standard techniques, such as affinity chromatography or immunoprecipitation. In addition, antibodies are useful for detecting the presence of a variant protein of the present invention in cells or tissues to determine the pattern of expression of the variant protein among various tissues in an organism and over the course of normal development or disease progression. Further, antibodies can be used to detect variant protein in situ, in vitro, in a bodily fluid, or in a cell lysate or supernatant in order to evaluate the amount and pattern of expression. Also, antibodies can be used to assess abnormal tissue distribution, abnormal expression during development, or expression in an abnormal condition, such as myocardial infarction. Additionally, antibody detection of circulating fragments of the full-length variant protein can be used to identify turnover.

[0351] Antibodies to the variant proteins of the present invention are also useful in pharmacogenomic analysis. Thus, antibodies against variant proteins encoded by alternative SNP alleles can be used to identify individuals that require modified treatment modalities.

[0352] Further, antibodies can be used to assess expression of the variant protein in disease states such as in active stages of the disease or in an individual with a predisposition to a disease related to the protein's function, particularly myocardial infarction. Antibodies specific for a variant protein encoded by a SNP-containing nucleic acid molecule of the present invention can be used to assay for the presence of the variant protein, such as to screen for predisposition to myocardial infarction as indicated by the presence of the variant protein.

[0353] Antibodies are also useful as diagnostic tools for evaluating the variant proteins in conjunction with analysis by electrophoretic mobility, isoelectric point, tryptic peptide digest, and other physical assays well known in the art.

[0354] Antibodies are also useful for tissue typing. Thus, where a specific variant protein has been correlated with expression in a specific tissue, antibodies that are specific for this protein can be used to identify a tissue type.

[0355] Antibodies can also be used to assess aberrant subcellular localization of a variant protein in cells in various tissues. The diagnostic uses can be applied, not only in genetic testing, but also in monitoring a treatment modality. Accordingly, where treatment is ultimately aimed at correcting the expression level or the presence of variant protein or aberrant tissue distribution or developmental expression of a variant protein, antibodies directed against the variant protein or relevant fragments can be used to monitor therapeutic efficacy.

[0356] The antibodies are also useful for inhibiting variant protein function, for example, by blocking the binding of a variant protein to a binding partner. These uses can also be applied in a therapeutic context in which treatment involves inhibiting a variant protein's function. An antibody can be used, for example, to block or competitively inhibit binding, thus modulating (agonizing or antagonizing) the activity of a variant protein. Antibodies can be prepared against specific variant protein fragments containing sites required for function or against an intact variant protein that is associated with a cell or cell membrane. For in vivo administration, an antibody may be linked with an additional therapeutic payload such as a radionuclide, an enzyme, an immunogenic epitope, or a cytotoxic agent. Suitable cytotoxic agents include, but are not limited to, bacterial toxin such as diphtheria, and plant toxin such as ricin. The in vivo half-life of an antibody or a fragment thereof may be lengthened by pegylation through conjugation to polyethylene glycol (Leong et al., Cytokine 16:106, 2001).

[0357] The invention also encompasses kits for using antibodies, such as kits for detecting the presence of a variant protein in a test sample. An exemplary kit can comprise antibodies such as a labeled or labelable antibody and a compound or agent for detecting variant proteins in a biological sample; means for determining the amount, or presence/absence of variant protein in the sample; means for comparing the amount of variant protein in the sample with a standard; and instructions for use.

[0358] Vectors and Host Cells

[0359] The present invention also provides vectors containing the SNP-containing nucleic acid molecules described herein. The term “vector” refers to a vehicle, preferably a nucleic acid molecule, which can transport a SNP-containing nucleic acid molecule. When the vector is a nucleic acid molecule, the SNP-containing nucleic acid molecule can be covalently linked to the vector nucleic acid. Such vectors include, but are not limited to, a plasmid, single or double stranded phage, a single or double stranded RNA or DNA viral vector, or artificial chromosome, such as a BAC, PAC, YAC, or MAC.

[0360] A vector can be maintained in a host cell as an extrachromosomal element where it replicates and produces additional copies of the SNP-containing nucleic acid molecules. Alternatively, the vector may integrate into the host cell genome and produce additional copies of the SNP-containing nucleic acid molecules when the host cell replicates.

[0361] The invention provides vectors for the maintenance (cloning vectors) or vectors for expression (expression vectors) of the SNP-containing nucleic acid molecules. The vectors can function in prokaryotic or eukaryotic cells or in both (shuttle vectors).

[0362] Expression vectors typically contain cis-acting regulatory regions that are operably linked in the vector to the SNP-containing nucleic acid molecules such that transcription of the SNP-containing nucleic acid molecules is allowed in a host cell. The SNP-containing nucleic acid molecules can also be introduced into the host cell with a separate nucleic acid molecule capable of affecting transcription. Thus, the second nucleic acid molecule may provide a trans-acting factor interacting with the cis-regulatory control region to allow transcription of the SNP-containing nucleic acid molecules from the vector. Alternatively, a trans-acting factor may be supplied by the host cell. Finally, a trans-acting factor can be produced from the vector itself. It is understood, however, that in some embodiments, transcription and/or translation of the nucleic acid molecules can occur in a cell-free system.

[0363] The regulatory sequences to which the SNP-containing nucleic acid molecules described herein can be operably linked include promoters for directing mRNA transcription. These include, but are not limited to, the left promoter from bacteriophage λ, the lac, TRP, and TAC promoters from E. coli, the early and late promoters from SV40, the CMV immediate early promoter, the adenovirus early and late promoters, and retrovirus long-terminal repeats.

[0364] In addition to control regions that promote transcription, expression vectors may also include regions that modulate transcription, such as repressor binding sites and enhancers. Examples include the SV40 enhancer, the cytomegalovirus immediate early enhancer, polyoma enhancer, adenovirus enhancers, and retrovirus LTR enhancers.

[0365] In addition to containing sites for transcription initiation and control, expression vectors can also contain sequences necessary for transcription termination and, in the transcribed region, a ribosome-binding site for translation. Other regulatory control elements for expression include initiation and termination codons as well as polyadenylation signals. A person of ordinary skill in the art would be aware of the numerous regulatory sequences that are useful in expression vectors (see, e.g., Sambrook and Russell, 2000, Molecular Cloning: A Laboratory Manual, Cold Spring Harbor Laboratory Press, Cold Spring Harbor, N.Y.).

[0366] A variety of expression vectors can be used to express a SNP-containing nucleic acid molecule. Such vectors include chromosomal, episomal, and virus-derived vectors, for example, vectors derived from bacterial plasmids, from bacteriophage, from yeast episomes, from yeast chromosomal elements, including yeast artificial chromosomes, from viruses such as baculoviruses, papovaviruses such as SV40, Vaccinia viruses, adenoviruses, poxviruses, pseudorabies viruses, and retroviruses. Vectors can also be derived from combinations of these sources such as those derived from plasmid and bacteriophage genetic elements, e.g., cosmids and phagemids. Appropriate cloning and expression vectors for prokaryotic and eukaryotic hosts are described in Sambrook and Russell, 2000, Molecular Cloning: A Laboratory Manual, Cold Spring Harbor Laboratory Press, Cold Spring Harbor, N.Y.

[0367] The regulatory sequence in a vector may provide constitutive expression in one or more host cells (e.g., tissue specific expression) or may provide for inducible expression in one or more cell types such as by temperature, nutrient additive, or exogenous factor, e.g., a hormone or other ligand. A variety of vectors that provide constitutive or inducible expression of a nucleic acid sequence in prokaryotic and eukaryotic host cells are well known to those of ordinary skill in the art.

[0368] A SNP-containing nucleic acid molecule can be inserted into the vector by methodology well-known in the art. Generally, the SNP-containing nucleic acid molecule that will ultimately be expressed is joined to an expression vector by cleaving the SNP-containing nucleic acid molecule and the expression vector with one or more restriction enzymes and then ligating the fragments together. Procedures for restriction enzyme digestion and ligation are well known to those of ordinary skill in the art.

[0369] The vector containing the appropriate nucleic acid molecule can be introduced into an appropriate host cell for propagation or expression using well-known techniques. Bacterial host cells include, but are not limited to, E. coli, Streptomyces, and Salmonella typhimurium. Eukaryotic host cells include, but are not limited to, yeast, insect cells such as Drosophila, animal cells such as COS and CHO cells, and plant cells.

[0370] As described herein, it may be desirable to express the variant peptide as a fusion protein. Accordingly, the invention provides fusion vectors that allow for the production of the variant peptides. Fusion vectors can, for example, increase the expression of a recombinant protein, increase the solubility of the recombinant protein, and aid in the purification of the protein by acting, for example, as a ligand for affinity purification. A proteolytic cleavage site may be introduced at the junction of the fusion moiety so that the desired variant peptide can ultimately be separated from the fusion moiety. Proteolytic enzymes suitable for such use include, but are not limited to, factor Xa, thrombin, and enterokinase. Typical fusion expression vectors include pGEX (Smith et al., Gene 67:31-40 (1988)), pMAL (New England Biolabs, Beverly, Mass.) and pRIT5 (Pharmacia, Piscataway, N.J.) which fuse glutathione S-transferase (GST), maltose E binding protein, or protein A, respectively, to the target recombinant protein. Examples of suitable inducible non-fusion E. coli expression vectors include pTrc (Amann et al., Gene 69:301-315 (1988)) and pET 11d (Studier et al., Gene Expression Technology: Methods in Enzymology 185:60-89 (1990)).

[0371] Recombinant protein expression can be maximized in a bacterial host by providing a genetic background wherein the host cell has an impaired capacity to proteolytically cleave the recombinant protein (Gottesman, S., Gene Expression Technology: Methods in Enzymology 185, Academic Press, San Diego, Calif. (1990) 119-128). Alternatively, the sequence of the SNP-containing nucleic acid molecule of interest can be altered to provide preferential codon usage for a specific host cell, for example, E. coli (Wada et al., Nucleic Acids Res. 20:2111-2118 (1992)).

[0372] The SNP-containing nucleic acid molecules can also be expressed by expression vectors that are operative in yeast. Examples of vectors for expression in yeast (e.g., S. cerevisiae) include pYepSec1 (Baldari, et al., EMBO J. 6:229-234 (1987)), pMFa (urjan et al., Cell 30:933-943(1982)), pJRY88 (Schultz et al., Gene 54:113-123 (1987)), and pYES2 (Invitrogen Corporation, San Diego, Calif.).

[0373] The SNP-containing nucleic acid molecules can also be expressed in insect cells using, for example, baculovirus expression vectors. Baculovirus vectors available for expression of proteins in cultured insect cells (e.g., Sf 9 cells) include the pAc series (Smith et al., Mol. Cell Biol. 3:2156-2165 (1983)) and the pVL series (Lucklow et al., Virology 170:31-39 (1989)).

[0374] In certain embodiments of the invention, the SNP-containing nucleic acid molecules described herein are expressed in mammalian cells using mammalian expression vectors. Examples of mammalian expression vectors include pCDM8 (Seed, B. Nature 329:840(1987)) and pMT2PC (Kaufinan et al., EMBO J. 6:187-195 (1987)).

[0375] The invention also encompasses vectors in which the SNP-containing nucleic acid molecules described herein are cloned into the vector in reverse orientation, but operably linked to a regulatory sequence that permits transcription of antisense RNA. Thus, an antisense transcript can be produced to the SNP-containing nucleic acid sequences described herein, including both coding and non-coding regions. Expression of this antisense RNA is subject to each of the parameters described above in relation to expression of the sense RNA (regulatory sequences, constitutive or inducible expression, tissue-specific expression).

[0376] The invention also relates to recombinant host cells containing the vectors described herein. Host cells therefore include, for example, prokaryotic cells, lower eukaryotic cells such as yeast, other eukaryotic cells such as insect cells, and higher eukaryotic cells such as mammalian cells.

[0377] The recombinant host cells can be prepared by introducing the vector constructs described herein into the cells by techniques readily available to persons of ordinary skill in the art. These include, but are not limited to, calcium phosphate transfection, DEAE-dextran-mediated transfection, cationic lipid-mediated transfection, electroporation, transduction, infection, lipofection, and other techniques such as those described in Sambrook and Russell, 2000, Molecular Cloning: A Laboratory Manual, Cold Spring Harbor Laboratory, Cold Spring Harbor Laboratory Press, Cold Spring Harbor, N.Y.).

[0378] Host cells can contain more than one vector. Thus, different SNP-containing nucleotide sequences can be introduced in different vectors into the same cell. Similarly, the SNP-containing nucleic acid molecules can be introduced either alone or with other nucleic acid molecules that are not related to the SNP-containing nucleic acid molecules, such as those providing trans-acting factors for expression vectors. When more than one vector is introduced into a cell, the vectors can be introduced independently, co-introduced, or joined to the nucleic acid molecule vector.

[0379] In the case of bacteriophage and viral vectors, these can be introduced into cells as packaged or encapsulated virus by standard procedures for infection and transduction. Viral vectors can be replication-competent or replication-defective. In the case in which viral replication is defective, replication can occur in host cells that provide functions that complement the defects.

[0380] Vectors generally include selectable markers that enable the selection of the subpopulation of cells that contain the recombinant vector constructs. The marker can be inserted in the same vector that contains the SNP-containing nucleic acid molecules described herein or may be in a separate vector. Markers include, for example, tetracycline or ampicillin-resistance genes for prokaryotic host cells, and dihydrofolate reductase or neomycin resistance genes for eukaryotic host cells. However, any marker that provides selection for a phenotypic trait can be effective.

[0381] While the mature variant proteins can be produced in bacteria, yeast, mammalian cells, and other cells under the control of the appropriate regulatory sequences, cell-free transcription and translation systems can also be used to produce these variant proteins using RNA derived from the DNA constructs described herein.

[0382] Where secretion of the variant protein is desired, which is difficult to achieve with multi-transmembrane domain containing proteins such as G-protein-coupled receptors (GPCRs), appropriate secretion signals can be incorporated into the vector. The signal sequence can be endogenous to the peptides or heterologous to these peptides.

[0383] Where the variant protein is not secreted into the medium, the protein can be isolated from the host cell by standard disruption procedures, including freeze/thaw, sonication, mechanical disruption, use of lysing agents, and the like. The variant protein can then be recovered and purified by well-known purification methods including, for example, ammonium sulfate precipitation, acid extraction, anion or cationic exchange chromatography, phosphocellulose chromatography, hydrophobic-interaction chromatography, affinity chromatography, hydroxylapatite chromatography, lectin chromatography, or high performance liquid chromatography.

[0384] It is also understood that, depending upon the host cell in which recombinant production of the variant proteins described herein occurs, they can have various glycosylation patterns, or may be non-glycosylated, as when produced in bacteria. In addition, the variant proteins may include an initial modified methionine in some cases as a result of a host-mediated process.

[0385] For further information regarding vectors and host cells, see Current Protocols in Molecular Biology, John Wiley & Sons, N.Y.

[0386] Uses of Vectors and Host Cells, and Transgenic Animals

[0387] Recombinant host cells that express the variant proteins described herein have a variety of uses. For example, the cells are useful for producing a variant protein that can be firther purified into a preparation of desired amounts of the variant protein or fragments thereof. Thus, host cells containing expression vectors are useful for variant protein production.

[0388] Host cells are also useful for conducting cell-based assays involving the variant protein or variant protein fragments, such as those described above as well as other formats known in the art. Thus, a recombinant host cell expressing a variant protein is useful for assaying compounds that stimulate or inhibit variant protein function. Such an ability of a compound to modulate variant protein function may not be apparent from assays of the compound on the native/wild-type protein, or from cell-free assays of the compound. Recombinant host cells are also useful for assaying functional alterations in the variant proteins as compared with a known function.

[0389] Genetically-engineered host cells can be further used to produce non-human transgenic animals. A transgenic animal is preferably a non-human mammal, for example, a rodent, such as a rat or mouse, in which one or more of the cells of the animal include a transgene. A transgene is exogenous DNA containing a SNP of the present invention which is integrated into the genome of a cell from which a transgenic animal develops and which remains in the genome of the mature animal in one or more of its cell types or tissues. Such animals are useful for studying the function of a variant protein in vivo, and identifying and evaluating modulators of variant protein activity. Other examples of transgenic animals include, but are not limited to, non-human primates, sheep, dogs, cows, goats, chickens, and amphibians. Transgenic non-human mammals such as cows and goats can be used to produce variant proteins which can be secreted in the animal's milk and then recovered.

[0390] A transgenic animal can be produced by introducing a SNP-containing nucleic acid molecule into the male pronuclei of a fertilized oocyte, e.g., by microinjection or retroviral infection, and allowing the oocyte to develop in a pseudopregnant female foster animal. Any nucleic acid molecules that contain one or more SNPs of the present invention can potentially be introduced as a transgene into the genome of a non-human animal.

[0391] Any of the regulatory or other sequences useful in expression vectors can form part of the transgenic sequence. This includes intronic sequences and polyadenylation signals, if not already included. A tissue-specific regulatory sequence(s) can be operably linked to the transgene to direct expression of the variant protein in particular cells or tissues.

[0392] Methods for generating transgenic animals via embryo manipulation and microinjection, particularly animals such as mice, have become conventional in the art and are described in, for example, U.S. Pat. Nos. 4,736,866 and 4,870,009, both by Leder et al., U.S. Pat. No. 4,873,191 by Wagner et al., and in Hogan, B., Manipulating the Mouse Embryo, (Cold Spring Harbor Laboratory Press, Cold Spring Harbor, N.Y., 1986). Similar methods are used for production of other transgenic animals. A transgenic founder animal can be identified based upon the presence of the transgene in its genome and/or expression of transgenic mRNA in tissues or cells of the animals. A transgenic founder animal can then be used to breed additional animals carrying the transgene. Moreover, transgenic animals carrying a transgene can further be bred to other transgenic animals carrying other transgenes. A transgenic animal also includes a non-human animal in which the entire animal or tissues in the animal have been produced using the homologously recombinant host cells described herein.

[0393] In another embodiment, transgenic non-human animals can be produced which contain selected systems that allow for regulated expression of the transgene. One example of such a system is the cre/loxP recombinase system of bacteriophage P1 (Lakso et al. PNAS 89:6232-6236 (1992)). Another example of a recombinase system is the FLP recombinase system of S. cerevisiae (O'Gorman et al. Science 251:1351-1355 (1991)). If a cre/loxP recombinase system is used to regulate expression of the transgene, animals containing transgenes encoding both the Cre recombinase and a selected protein are generally needed. Such animals can be provided through the construction of “double” transgenic animals, e.g., by mating two transgenic animals, one containing a transgene encoding a selected variant protein and the other containing a transgene encoding a recombinase.

[0394] Clones of the non-human transgenic animals described herein can also be produced according to the methods described in, for example, Wilmut, I. et al. Nature 385:810-813 (1997) and PCT International Publication Nos. WO 97/07668 and WO 97/07669. In brief, a cell (e.g., a somatic cell) from the transgenic animal can be isolated and induced to exit the growth cycle and enter Gₒ phase. The quiescent cell can then be fused, e.g., through the use of electrical pulses, to an enucleated oocyte from an animal of the same species from which the quiescent cell is isolated. The reconstructed oocyte is then cultured such that it develops to morula or blastocyst and then transferred to pseudopregnant female foster animal. The offspring born of this female foster animal will be a clone of the animal from which the cell (e.g., a somatic cell) is isolated.

[0395] Transgenic animals containing recombinant cells that express the variant proteins described herein are useful for conducting the assays described herein in an in vivo context. Accordingly, the various physiological factors that are present in vivo and that could influence ligand or substrate binding, variant protein activation, signal transduction, or other processes or interactions, may not be evident from in vitro cell-free or cell-based assays. Thus, non-human transgenic animals of the present invention may be used to assay in vivo variant protein function as well as the activities of a therapeutic agent or compound that modulates variant protein function/activity or expression. Such animals are also suitable for assessing the effects of null mutations (i.e., mutations that substantially or completely eliminate one or more variant protein functions).

[0396] For further information regarding transgenic animals, see Houdebine, “Antibody manufacture in transgenic animals and comparisons with other systems”, Curr Opin Biotechnol. December 2002;13(6):625-9; Petters et al., “Transgenic animals as models for human disease”, Transgenic Res. 2000;9(4-5):347-51; discussion 345-6; Wolf et al., “Use of transgenic animals in understanding molecular mechanisms of toxicity”, J Pharm Pharmacol. June 1998;50(6):567-74; Echelard, “Recombinant protein production in transgenic animals”, Curr Opin Biotechnol. October 1996;7(5):536-40; Houdebine, “Transgenic animal bioreactors”, Transgenic Res. 2000;9(4-5):305-20; Pirity et al., “Embryonic stem cells, creating transgenic animals”, Methods Cell Biol. 1998;57:279-93; and Robl et al., “Artificial chromosome vectors and expression of complex proteins in transgenic animals”, Theriogenology. Jan. 1, 2003;59(1):107-13.

### EXAMPLES

### Statistical Analysis of SNP Association with Myocardial Infraction and Recurrent Myocardial Infarction

[0397] Myocardial Infarction studies (see Table 6)

[0398] A case-control genetic study to determine the association of SNPs in the human genome with myocardial infarction (MI) was carried out using genomic DNA extracted from two independently collected case-control sample sets.

[0399] Study S12 had 1400 samples, in which patients (cases) had self-reported history of MI, and controls had no history of MI or of acute angina lasting more than 1 hour. Study S28 had 1500 samples, in which patients (cases) had clinical evidence of history of MI, and controls had no history of MI. All individuals who were included in each study had signed a written informed consent form. The study protocol was IRB approved.

[0400] DNA was extracted from blood samples using conventional DNA extraction methods such as the QIA-amp kit from Qiagen. The samples were used for pooling studies, in which DNA from about 50 individuals was pooled, and allele frequencies were determined in pooled DNA. Allele frequencies were obtained on a PRISM 7900HT sequence detection PCR system (Applied Biosystems, Foster City, Calif.) by allele-specific PCR, similar to the method described by Germer et al (Germer S., Holland M. J., Higuchi R. 2000, Genome Res. 10: 258-266). Primers for the allele-specific PCR reactions are disclosed in Table 5.

[0401] Summary statistics for demographic and environmental traits, history of vascular disease, and allele frequencies for the tested SNPs were obtained and compared between cases and controls. No multiple testing corrections were made.

[0402] Statistical analysis was carried out using Fisher's exact test of allelic association. Effect sizes were estimated through allelic odds ratios. The reported allele (an allele presented in any of Tables 6-8) may be under-represented in cases (with a lower allele frequency in cases than in controls, indicating that the reported allele is associated with decreased risk for disease and the other allele is a risk factor for disease) or over-represented in cases (indicating that the reported allele is a risk factor in the development of disease).

[0403] A SNP was considered to be a significant genetic marker if it exhibited a p-value <0.05 in the allelic association test or in any of the two genotypic tests (dominant, recessive). The association of a marker with MI was considered replicated if the marker exhibited an allelic association test p-value <0.05 in one of the sample sets and the same test and strata (or substrata) were significant (p<0.05) in another independent sample set.

[0404] An example of a replicated marker, where the reported allele is associated with decreased risk for MI is hCV1455653 (Table 6). hCV1455653 shows significant association with male individuals (strata=“M”) of study S12 and with male individuals (Strata=“M”) of study S28. The odds ratio in both studies is less than 1 (0.7 and 0.5 in studies S12 and S28, respectively), using the same reported allele (Allele=“T”) for analysis.

[0405] An example of a replicated marker, where the reported allele is associated with increased risk for MI is hCV15853281 (Table 6). hCV15853281 shows significant association with male individuals (Strata=“M”) of study S12 and with males individuals of study S28 (Strata=“M”). The odds ratio in both studies is greater than 1 (1.4 in both studies), using the same reported allele (Allele=“T”) for analysis.

[0406] Myocardial Infarction (MI) and Recurrent Myocardial Infarction (RMI) Studies (see Tables 7-8)

[0407] To identify genetic markers associated with RMI, samples from the Cholesterol and Recurrent Events (CARE) cohort study were genotyped. A well-documented MI was one of the enrollment criteria for the CARE study. Patients were followed up for 5 years and rates of recurrent MI (RMI) were recorded in Pravastatin and placebo treated groups.

[0408] In the initial analysis, SNP genotype frequencies in a group of 264 patients who had an RMI (second, third, or fourth) during the 5 years of CARE follow-up (During-CARE cases) were compared with the SNP genotype frequencies in a group of 1255 CARE patients who had not experienced an MI during the 5-years of CARE follow-up (controls). This is referred to as the “During-CARE” RMI study.

[0409] To replicate the initial findings, a second group of 394 CARE patients was analyzed who had an MI prior to the MI at CARE enrollment but who had not experienced an MI during the 5-years of CARE follow-up (Pre-CARE RMI cases). The genotype frequencies in this group were compared to a second independent group of controls consisting of 1221 CARE patients who did not have an MI during CARE follow-up. This is referred to as the “Pre-CARE” RMI Study. No patients from the During-CARE Study were used in Pre-CARE Study.

[0410] In the CARE Cohort Study, SNP genotype frequencies in 264 patients who in addition to an MI at CARE enrollment had another MI (second, third, or fourth) during the 5 years of CARE follow-up were compared with SNP genotype frequencies in all CARE patients who had not experienced another MI during 5-years of CARE follow-up. The Cohort Study design allows one to calculate relative and absolute risks, sensitivity, specificity, and other important characteristics of predictive genetic tests. The SNPs associated with RMI in the During-CARE, Pre-CARE, or CARE Cohort Studies were also compared to SNPs associated with primary MI in a study referred to as Study S12.

[0411] Study S12 had 1400 samples. MI patients (cases) in this study had a self-reported history of MI, and controls had no history of MI or acute angina lasting more than one hour. Allele frequencies in this study were detected in pooling experiments, in which DNA from about 50 individuals was pooled, and allele frequencies were determined in the pooled DNA. For study S12, only male cases and controls were used in pooling studies.

[0412] Disease associations were analyzed using any one of three categories of case and control status (see “Status Name” definitions for Tables 7-8 in the section entitled “Description of Tables 6-8”). Any SNPs associated with RMI in one of the three CARE studies (During-CARE, Pre-CARE, CARE Cohort Study) that were also associated with primary MI in the S12 Study in any one of three status categories were considered to be replicated associations.

[0413] DNA was extracted from blood samples using conventional DNA extraction methods like the QIA-amp kit from Qiagen. Genotypes were obtained on a PRISM 7900HT sequence detection PCR system (Applied Biosystems, Foster City, Calif.) by allele-specific PCR, similar to the method described by Germer et al (Germer S., Holland M. J., Higuchi R. 2000, Genome Res. 10: 258-266).

[0414] Statistical analysis was carried out using an asymptotic chi square test for allelic, dominant, or recessive association. Replicated SNPs (SNPs demonstrating an association with RMI in more than one study) are reported in Tables 7-8. A SNP was considered, replicated if the at-risk alleles in both sample sets were identical, the p-values were less than 0.05 in both sample sets, and the significant association was seen in the same stratum in both sets or one stratum was inclusive of the other.

[0415] Effect sizes were estimated through allelic odds ratios and odds ratios for dominant and recessive modes. Homogeneity of Cochran-Mantel-Haenszel odds ratios was tested across different strata using the Breslow-Day test. A SNP was considered to be a significant genetic marker if it exhibited a p-value <0.05 in the allelic association test or in any of the two genotypic tests (dominant, recessive). Haldane Odds Ratios were used if either the case or control count was zero. SNPs with significant HWE violations in both cases and controls (p<1×10⁻⁴ in both tests) were not considered for further analysis, since significant deviation from HWE in both cases and controls for individual markers can be indicative of genotyping errors.

[0416] All publications and patents cited in this specification are herein incorporated by reference in their entirety. Various modifications and variations of the described compositions, methods and systems of the invention will be apparent to those skilled in the art without departing from the scope and spirit of the invention. Although the invention has been described in connection with specific preferred embodiments and certain working examples, it should be understood that the invention as claimed should not be unduly limited to such specific embodiments. Indeed, various modifications of the above-described modes for carrying out the invention that are obvious to those skilled in the field of molecular biology, genetics and related fields are intended to be within the scope of the following claims.

TABLE 1

Transcript SNP info and associated gene/protein
information

| | |
|---|---|
| Gene Number: | 1 |
| Celera Gene: | hCG1789838 - 118000094879268 |
| Celera Transcript: | hCT1814657 - 118000094879375 |
| Public Transcript | |
| Accession: | |
| Celera Protein: | hCP1768958 - 197000069405836 |
| Public Protein | |
| Accession: | |
| Gene Symbol: | ABCA1 |
| Protein Name: | ATP-binding cassette, sub- |
| | family A (ABC1), member 1 |
| Celera Genomic Axis: | GA_x5YUV32VU0F |
| | (7748303 . . . 7915441) |
| Chromosome: | 9 |
| OMIM NUMBER: | 600046 |
| OMIM Information: | Tangier disease, 205400 (3); |
| | HDL deficiency, familial, |
| | 604091 (3);/Cerebral amyloid |
| | angiopathy, 105150 (3); {Cor- |
| | onary artery disease in fami- |
| | lial hypercholesterolemia, |
| | protection against}, 143890 |
| | (3) |
| Transcript Sequence | |
| (SEQ ID NO: 1): | |
| Protein Sequence | |
| (SEQ ID NO: 30): | |
| SNP Information | |
| Context | |
| (SEQ ID NO: 59): | |

GGCTACCAGTTACATTTGACAAGTCTGTGCAATGGATCAAAATCAGAAGA
GATGATTCAACTTGGTGACCAAGAAGTTTCTGAGCTTTGTGGCCTACCAA
RGGAGAAACTGGCTGCAGCAGAGCGAGTACTTCGTTCCAACATGGACATC
CTGAAGCCAATCCTGAGAACACTAAACTCTACATCTCCCTTCCCGAGCAA
G

| | |
|---|---|
| Celera SNP ID: | hCV2741051 |
| Public SNP ID: | rs2230806 |
| SNP in Transcript | SEQ ID NO: 1 |
| Sequence | |
| SNP Position | 811 |
| Transcript: | |
| SNP Source: | Applera |
| Population (Allele, | Caucasian (G, 26\|A, 14) afri- |
| Count): | can american (G, 14\|A, 24) |
| | total (G, 40\|A, 38) |
| SNP Type: | Missense Mutation |
| Protein Coding: | SEQ ID NO: 30, at position |
| | 159, (R, AGG) (K, AAG) |
| SNP Source: | HGMD; dbSNP; Celera; HapMap; |
| | HGBASE; CDX_Heart |
| Population (Allele, | caucasian (G, 101\|A, 19) |
| Count): | |
| SNP Type: | Missense Mutation |
| Protein Coding: | SEQ ID NO: 30, at position |
| | 159, (R, AGG) (K, AAG) |
| Context | |
| (SEQ ID NO: 60): | |

GCCATCAAACAAATGAAGAAACACCTAAAGCTGGCCAAGGACAGTTCTGC
AGATCGATTTCTCAACAGCTTGGGAAGATTTATGACAGGACTGGACACCA
RAAATAATGTCAAGGTGTGGTTCAATAACAAGGGCTGGCATGCAATCAGC
TCTTTCCTGAATGTCATCAACAATGCCATTCTCCGGGCCAACCTGCAAAA
G

| | |
|---|---|
| Celera SNP ID: | hCV2741104 |
| Public SNP ID: | rs2230808 |
| SNP in Transcript | SEQ ID NO: 1 |
| Sequence | |
| SNP Position | 4915 |
| Transcript: | |
| SNP Source: | dbSNP; Celera; HapMap; |
| | ABI_Val; HGBASE; CDX_Heart |
| Population (Allele, | caucasian (A, 19\|G, 101) |
| Count): | |
| SNP Type: | Missense Mutation |
| Protein Coding: | SEQ ID NO: 30, at position |
| | 1527, (R, AGA) (K, AAA) |
| Gene Number: | 1 |
| Celera Gene: | hCG1789838 - 118000094879268 |
| Celera Transcript: | hCT1829098 - 118000094879269 |
| Public Transcript | NM_005502 |
| Accession: | |
| Celera Protein: | hCP1713177 - 197000069405834 |
| Public Protein | NP_005493 |
| Accession: | |
| Gene Symbol: | ABCA1 |
| Protein Name: | ATP-binding cassette, sub- |
| | family A (ABC1), member 1 |
| Celera Genomic Axis: | GA_x5YUV32VU0F |
| | (7748303 . . . 7915441) |
| Chromosome: | 9 |
| OMIM NUMBER: | 600046 |
| OMIM Information: | Tangier disease, 205400 (3); |
| | HDL deficiency, familial, |
| | 604091 (3);/Cerebral amyloid |
| | angiopathy, 105150 (3); {Cor- |
| | onary artery disease in fami- |
| | lial hypercholesterolemia, |
| | protection against, 143890 |
| | (3) |
| Transcript Sequence | |
| (SEQ ID NO: 2): | |
| Protein Sequence | |
| (SEQ ID NO: 31): | |
| SNP Information | |
| Context | |
| (SEQ ID NO: 61): | |

GGCTACCAGTTACATTTGACAAGTCTGTGCAATGGATCAAAATCAGAAGA
GATGATTCAACTTGGTGACCAAGAAGTTTCTGAGCTTTGTGGCCTACCAA
RGGAGAAACTGGCTGCAGCAGAGCGAGTACTTCGTTCCAACATGGACATC
CTGAAGCCAATCCTGAGAACACTAAACTCTACATCTCCCTTCCCGAGCAA
G

| | |
|---|---|
| Celera SNP ID: | hCV2741051 |
| Public SNP ID: | rs2230806 |
| SNP in Transcript | SEQ ID NO: 2 |
| Sequence | |
| SNP Position | 969 |
| Transcript: | |
| SNP Source: | Applera |
| Population (Allele, | caucasian (G, 26\|A, 14) afri- |
| Count): | can american (G, 14\|A, 24) |
| | total (G, 40\|A, 38) |
| SNP Type: | Missense Mutation |
| Protein Coding: | SEQ ID NO: 31, at position |
| | 219, (R, AGG) (K, AAG) |
| SNP Source: | HGMD; dbSNP; Celera; HapMap; |
| | HGBASE; CDX_Heart |
| Population (Allele, | caucasian (G, 101\|A, 19) |
| Count): | |
| SNP Type: | Missense Mutation |
| Protein Coding: | SEQ ID NO: 31, at position |
| | 219, (R, AGG) (K, AAG) |
| Context | |
| (SEQ ID NO: 62): | |

GCCATCAAACAAATGAAGAAACACCTAAAGCTGGCCAAGGACAGTTCTGC
AGATCGATTTCTCAACAGCTTGGGAAGATTTATGACAGGACTGGACACCA
RAAATAATGTCAAGGTGTGGTTCAATAACAAGGGCTGGCATGCAATCAGC
TCTTTCCTGAATGTCATCAACAATGCCATTCTCCGGGCCAACCTGCAAAA
G

| | |
|---|---|
| Celera SNP ID: | hCV2741104 |
| Public SNP ID: | rs2230808 |
| SNP in Transcript | SEQ ID NO: 2 |
| Sequence | |
| SNP Position | 5073 |
| Transcript: | |
| SNP Source: | dbSNP; Celera; HapMap; |
| | ABI_Val; HGBASE; CDX_Heart |
| Population (Allele, | caucasian (A,19\|G, 101) |
| Count): | |
| SNP Type: | Missense Mutation |
| Protein Coding: | SEQ ID NO: 31, at position |
| | 1587, (R, AGA) (K, AAA) |
| Gene Number: | 1 |
| Celera Gene: | hCG1789838 - 118000094879268 |
| Celera Transcript: | hCT2274783 - 118000094879323 |
| Public Transcript | |
| Accession: | |
| Celera Protein: | hCP1872571 - 197000069405835 |
| Public Protein | |
| Accession: | |
| Gene Symbol: | ABCA1 |
| Protein Name: | ATP-binding cassette, sub- |
| | family A (ABC1), member 1 |
| Celera Genomic Axis: | GA_x5YUV32VU0F |
| | (7748303 . . . 7915441) |
| Chromosome: | 9 |
| OMIM NUMBER: | 600046 |
| OMIM Information: | Tangier disease, 205400 (3); |
| | HDL deficiency, familial, |
| | 604091 (3);/Cerebral amyloid |
| | angiopathy, 105150 (3); {Cor- |
| | onary artery disease in fami- |
| | lial hypercholesterolemia, |
| | protection against}, 143890 |
| | (3) |
| Transcript Sequence | |
| (SEQ ID NO: 3): | |
| Protein Sequence | |
| (SEQ ID NO: 32): | |
| SNP Information | |
| Context | |
| (SEQ ID NO: 63): | |

GGCTACCAGTTACATTTGACAAGTCTGTGCAATGGATCAAAATCAGAAGA
GATGATTCAACTTGGTGACCAAGAAGTTTCTGAGCTTTGTGGCCTACCAA
RGGAGAAACTGGCTGCAGCAGAGCGAGTACTTCGTTCCAACATGGACATC
CTGAAGCCAATCCTGAGAACACTAAACTCTACATCTCCCTTCCCGAGCAA
G

| | |
|---|---|
| Celera SNP ID: | hCV2741051 |
| Public SNP ID: | rs2230806 |
| SNP in Transcript | SEQ ID NO: 3 |
| Sequence | |
| SNP Position | 590 |
| Transcript: | |
| SNP Source: | Applera |
| Population (Allele, | caucasian (G, 26\|A, 14) afri- |
| Count): | can american (G, 14\|A, 24) |
| | total (G, 40\|A, 38) |
| SNP Type: | Missense Mutation |
| Protein Coding: | SEQ ID NO: 32, at position |
| | 159, (R, AGG) (K, AAG) |
| SNP Source: | HGMD; dbSNP; Celera; HapMap; |
| | HGBASE; CDX_Heart |
| Population (Allele, | caucasian (G, 101\|A, 19) |
| Count): | |
| SNP Type: | Missense Mutation |
| Protein Coding: | SEQ ID NO: 32, at position |
| | 159, (R, AGG) (K, AAG) |
| Context | |
| (SEQ ID NO: 64): | |

GCCATCAAACAAATGAAGAAACACCTAAAGCTGGCCAAGGACAGTTCTGC
AGATCGATTTCTCAACAGCTTGGGAAGATTTATGACAGGACTGGACACCA
RAAATAATGTCAAGGTGTGGTTCAATAACAAGGGCTGGCATGCAATCAGC
TCTTTCCTGAATGTCATCAACAATGCCATTCTCCGGGCCAACCTGCAAAA
G

| | |
|---|---|
| Celera SNP ID: | hCV2741104 |
| Public SNP ID: | rs2230808 |
| SNP in Transcript | SEQ ID NO: 3 |
| Sequence | |
| SNP Position | 4694 |
| Transcript: | |
| SNP Source: | dbSNP; Celera; HapMap; |
| | ABI_Val; HGBASE; CDX_Heart |
| Population (Allele, | caucasian (A, 19\|G, 101) |
| Count): | |
| SNP Type: | Missense Mutation |
| Protein Coding: | SEQ ID NO: 32, at position |
| | 1527, (R, AGA) (K, AAA) |
| Gene Number: | 1 |
| Celera Gene: | hCG1789838 - 118000094879268 |
| Celera Transcript: | hCT2274784 - 118000094879428 |
| Public Transcript | |
| Accession: | |
| Celera Protein: | hCP1872573 - 197000069405837 |
| Public Protein | |
| Accession: | |
| Gene Symbol: | ABCA1 |
| Protein Name: | ATP-binding cassette, sub- |
| | family A (ABC1), member 1 |
| Celera Genomic Axis: | GA_x5YUV32VU0F |
| | (7748303 . . . 7915441) |
| Chromosome: | 9 |
| OMIM NUMBER: | 600046 |
| OMIM Information: | Tangier disease, 205400 (3); |
| | HDL deficiency, familial, |
| | 604091 (3);/Cerebral amyloid |
| | angiopathy, 105150 (3); {Cor- |
| | onary artery disease in fami- |
| | lial hypercholesterolemia, |
| | protection against}, 143890 |
| | (3) |
| Transcript Sequence | |
| (SEQ ID NO: 4): | |
| Protein Sequence | |
| (SEQ ID NO: 33): | |
| SNP Information | |
| Context | |
| (SEQ ID NO: 65): | |

GGCTACCAGTTACATTTGACAAGTCTGTGCAATGGATCAAAATCAGAAGA
GATGATTCAACTTGGTGACCAAGAAGTTTCTGAGCTTTGTGGCCTACCAA
RGGAGAAACTGGCTGCAGCAGAGCGAGTACTTCGTTCCAACATGGACATC
CTGAAGCCAATCCTGGTGAGTAGACTTGCTCACTGGAGAAACTTCAAGCA
C

| | |
|---|---|
| Celera SNP ID: | hCV2741051 |
| Public SNP ID: | rs2230806 |
| SNP in Transcript | SEQ ID NO: 4 |
| Sequence | |
| SNP Position | 969 |
| Transcript: | |
| SNP Source: | Applera |
| Population (Allele, | caucasian (G, 26\|A, 14) afri- |
| Count): | can american (G, 14\|A, 24) |
| | total (G, 40\|A, 38) |
| SNP Type: | Missense Mutation |
| Protein Coding: | SEQ ID NO: 33, at position |
| | 219, (R, AGG) (K, AAG) |
| SNP Source: | HGMD; dbSNP; Celera; HapMap; |
| | HGBASE; CDX_Heart |
| Population (Allele, | caucasian (G, 101\|A, 19) |
| Count): | |
| SNP Type: | Missense Mutation |
| Protein Coding: | SEQ ID NO: 33, at position |
| | 219, (R, AGG) (K, AAG) |
| Gene Number: | 1 |
| Celera Gene: | hCG1789838 - 118000094879268 |
| Celera Transcript: | hCT2274785 - 118000094879439 |
| Public Transcript | |
| Accession: | |
| Celera Protein: | hCP1872574 - 197000069405838 |
| Public Protein | |
| Accession: | |
| Gene Symbol: | ABCA1 |
| Protein Name: | ATP-binding cassette, sub- |
| | family A (ABC1), member 1 |
| Celera Genomic Axis: | GA_x5YUV32VU0F |
| | (7748303 . . . 7915441) |
| Chromosome: | 9 |
| OMIM NUMBER: | 600046 |
| OMIM Information: | Tangier disease, 205400 (3); |
| | HDL deficiency, familial, |
| | 604091 (3);/Cerebral amyloid |
| | angiopathy, 105150 (3); {Cor- |
| | onary artery disease in fami- |
| | lial hypercholesterolemia, |
| | protection against}, 143890 |
| | (3) |
| Transcript Sequence | |
| (SEQ ID NO: 5): | |
| Protein Sequence | |
| (SEQ ID NO: 34): | |
| SNP Information | |
| Context | |
| (SEQ ID NO: 66): | |

GGCTACCAGTTACATTTGACAAGTCTGTGCAATGGATCAAAATCAGAAGA
GATGATTCAACTTGGTGACCAAGAAGTTTCTGAGCTTTGTGGCCTACCAA
RGGAGAAACTGGCTGCAGCAGAGCGAGTACTTCGTTCCAACATGGACATC
CTGAAGCCAATCCTGATGGATGTGACATGTGATGACATTGCACATGGGCA
G

| | |
|---|---|
| Celera SNP ID: | hCV2741051 |
| Public SNP ID: | rs2230806 |
| SNP in Transcript | SEQ ID NO: 5 |
| Sequence | |
| SNP Position | 969 |
| Transcript: | |
| SNP Source: | Applera |
| Population (Allele, | caucasian (G, 26\|A, 14) afri- |
| Count): | can american (G, 14\|A, 24) |
| | total (G, 40\|A, 38) |
| SNP Type: | Missense Mutation |
| Protein Coding: | SEQ ID NO: 34, at position |
| | 219, (R, AGG) (K, AAG) |
| SNP Source: | HGMD; dbSNP; Celera; HapMap; |
| | HGBASE; CDX_Heart |
| Population (Allele, | caucasian (G, 101\|A, 19) |
| Count): | |
| SNP Type: | Missense Mutation |
| Protein Coding: | SEQ ID NO: 34, at position |
| | 219, (R, AGG) (K, AAG) |
| Gene Number: | 2 |
| Celera Gene: | hCG2002097 - 62000133391414 |
| Celera Transcript: | hCT2286685 - 62000133391435 |
| Public Transcript | NM_000442 |
| Accession: | |
| Celera Protein: | hCP1792231 - 197000064924872 |
| Public Protein | NP_000433 |
| Accession: | |
| Gene Symbol: | PECAM1 |
| Protein Name: | platelet/endothelial cell |
| | adhesion molecule (CD31 |
| | antigen) |
| Celera Genomic Axis: | GA_x5YUV32W3KM |
| | (443325 . . . 554985) |
| Chromosome: | 17 |
| OMIM NUMBER: | 173445 |
| OMIM Information: | |
| Transcript Sequence | |
| (SEQ ID NO: 6): | |
| Protein Sequence | |
| (SEQ ID NO: 35): | |
| SNP Information | |
| Context | |
| (SEQ ID NO: 67): | |

AAGCAGATACTCTAGAACGGAAGGCTCCCTTGATGGAACTTAGACAGCAA
GGCCAGATGCACATCCCTGGAAGGACATCCATGTTCCGAGAAGAACAGAT
RATCCCTGTATTTCAAGACCTCTGTGCACTTATTTATGAACCTGCCCTGC
TCCCACAGAACACAGCAATTCCTCAGGCTAAGCTGCCGGTTCTTAAATCC
A

| | |
|---|---|
| Celera SNP ID: | hCV435368 |
| Public SNP ID: | rs2812 |
| SNP in Transcript | SEQ ID NO: 6 |
| Sequence | |
| SNP Position | 2461 |
| Transcript: | |
| SNP Source: | Applera |
| Population (Allele, | caucasian (G, 13\|A, 17) afr- |
| Count): | ican american (G, 15\|A, 21) |
| | total (G, 28\|A, 38) |
| SNP Type: | UTR3 |
| SNP Source: | dbSNP; Celera; HapMap; HGBASE |
| Population (Allele, | caucasian (A, 51\|G, 69) |
| Count): | |
| SNP Type: | UTR3 |
| Gene Number: | 2 |
| Celera Gene: | hCG2002097 - 62000133391414 |
| Celera Transcript: | hCT2286687 - 62000133391415 |
| Public Transcript | NM_000442 |
| Accession: | |
| Celera Protein: | hCP1792230 - 197000064924871 |
| Public Protein | NP_000433 |
| Accession: | |
| Gene Symbol: | PECAM1 |
| Protein Name: | platelet/endothelial cell |
| | adhesion molecule (CD31 |
| | antigen) |
| Celera Genomic Axis: | GA_x5YUV32W3KM |
| | (443325 . . . 554985) |
| Chromosome: | 17 |
| OMIM NUMBER: | 173445 |
| OMIM Information: | |
| Transcript Sequence | |
| (SEQ ID NO: 7): | |
| Protein Sequence | |
| (SEQ ID NO: 36): | |
| SNP Information | |
| Context | |
| (SEQ ID NO: 68): | |

AAGCAGATACTCTAGAACGGAAGGCTCCCTTGATGGAACTTAGACAGCAA
GGCCAGATGCACATCCCTGGAAGGACATCCATGTTCCGAGAAGAACAGAT
RATCCCTGTATTTCAAGACCTCTGTGCACTTATTTATGAACCTGCCCTGC
TCCCACAGAACACAGCAATTCCTCAGGCTAAGCTGCCGGTTCTTAAATCC
A

| | |
|---|---|
| Celera SNP ID: | hCV435368 |
| Public SNP ID: | rs2812 |
| SNP in Transcript | SEQ ID NO: 7 |
| Sequence | |
| SNP Position | 2493 |
| Transcript: | |
| SNP Source: | Applera |
| Population (Allele, | caucasian (G, 13\|A, 17) afri- |
| Count): | can american (G, 15\|A, 21) |
| | total (G, 28\|A, 38) |
| SNP Type: | UTR3 |
| SNP Source: | dbSNP; Celera; HapMap; HGBASE |
| Population (Allele, | caucasian (A, 51\|G, 69) |
| Count): | |
| SNP Type: | UTR3 |
| Gene Number: | 3 |
| Celera Gene: | hCG1813428 - 145000147105376 |
| Celera Transcript: | hCT1813429 - 145000147105510 |
| Public Transcript | |
| Accession: | |
| Celera Protein: | hCP1768365 - 197000064940527 |
| Public Protein | |
| Accession: | |
| Gene Symbol: | FN1 |
| Protein Name: | fibronectin 1 |
| Celera Genomic Axis: | GA_x5YIJV32VWPT |
| | (20899546 . . . 20995013) |
| Chromosome: | 2 |
| OMIM NUMBER: | 135600 |
| OMIM Information: | ?Ehlers-Danlos syndrome, |
| | type X, 225310 (1) |
| Transcript Sequence | |
| (SEQ ID NO: 8): | |
| Protein Sequence | |
| (SEQ ID NO: 37): | |
| SNP Information | |
| Context | |
| (SEQ ID NO: 69): | |

TCACATCCCCAGGGAAGATGTAGACTATCACCTGTACCCACACGGTCCGG
GACTCAATCCAAATGCCTCTACAGGACAAGAAGCTCTCTCTCAGACAACC
RTCTCATGGGCCCCATTCCAGGACACTTCTGAGTACATCATTTCATGTCA
TCCTGTTGGCACTGATGAAGAACCCTTACAGTTCAGGGTTCCTGGAACTT
C

| | |
|---|---|
| Celera SNP ID: | hCV25592965 |
| Public SNP ID: | rs17449032 |
| SNP in Transcript | SEQ ID NO: 8 |
| Sequence | |
| SNP Position | 6733 |
| Transcript: | |
| SNP Source: | Applera |
| Population (Allele, | caucasian (G, 1\|A, 39) afri- |
| Count): | can american (G, 1\|A, 35) |
| | total (G, 2\|A, 74) |
| SNP Type: | Missense Mutation |
| Protein Coding: | SEQ ID NO: 37, at position |
| | 2121, (I, ATC) (V, GTC) |
| SNP Source: | dbSNP; Applera |
| Population (Allele, | caucasian (A, 110\|G, 6) |
| Count): | |
| SNP Type: | Missense Mutation |
| Protein Coding: | SEQ ID NO: 37, at position |
| | 2121, (I, ATC) (V, GTC) |
| Gene Number: | 3 |
| Celera Gene: | hCG1813428 - 145000147105376 |
| Celera Transcript: | hCT1813430 - 145000147111872 |
| Public Transcript | |
| Accession: | |
| Celera Protein: | hCP1768386 - 197000064940534 |
| Public Protein | |
| Accession: | |
| Gene Symbol: | FN1 |
| Protein Name: | fibronectin 1 |
| Celera Genomic Axis: | GA_x5YUV32VWPT |
| | (20899546 . . . 20995013) |
| Chromosome: | 2 |
| OMIM NUMBER: | 135600 |
| OMIM Information: | ?Ehlers-Danlos syndrome, |
| | type X, 225310 (1) |
| Transcript Sequence | |
| (SEQ ID NO: 9): | |
| Protein Sequence | |
| (SEQ ID NO: 38): | |
| SNP Information | |
| Context | |
| (SEQ ID NO: 70): | |

TTTTAGGCGGACCACACCGCCCACAACGGCCACCCCCATAAGGCATAGGC
CAAGACCATACCCGCCGAATGTAGGACAAGAAGCTCTCTCTCAGACAACC
RTCTCATGGGCCCCATTCCAGGACACTTCTGAGTACATCATTTCATGTCA
TCCTGTTGGCACTGATGAAGAACCCTTACAGTTCAGGGTTCCTGGAACTT
C

| | |
|---|---|
| Celera SNP ID: | hCV25592965 |
| Public SNP ID: | rs17449032 |
| SNP in Transcript | SEQ ID NO: 9 |
| Sequence | |
| SNP Position | 6588 |
| Transcript: | |
| SNP Source: | Applera |
| Population (Allele, | caucasian (G, 1\|A, 39) afri- |
| Count): | can american (G, 1\|A, 35) |
| | total (G, 2\|A, 74) |
| SNP Type: | Missense Mutation |
| Protein Coding: | SEQ ID NO: 38, at position |
| | 1083, (I, ATC) (V, GTC) |
| SNP Source: | dbSNP; Applera |
| Population (Allele, | caucasian (A, 110\|G, 6) |
| Count): | |
| SNP Type: | Missense Mutation |
| Protein Coding: | SEQ ID NO: 38, at position |
| | 1083, (I, ATC) (V, GTC) |
| Gene Number: | 3 |
| Celera Gene: | hCG1813428 - 145000147105376 |
| Celera Transcript: | hCT1813432 - 145000147111772 |
| Public Transcript | NM_002026 |
| Accession: | |
| Celera Protein: | hCP1768361 - 197000064940532 |
| Public Protein | NP_002017 |
| Accession: | |
| Gene Symbol: | FN1 |
| Protein Name: | fibronectin 1 |
| Celera Genomic Axis: | GA_x5YUV32VWPT |
| | (20899546 . . . 20995013) |
| Chromosome: | 2 |
| OMIM NUMBER: | 135600 |
| OMIM Information: | ?Ehlers-Danlos syndrome, |
| | type X, 225310 (1) |
| Transcript Sequence | |
| (SEQ ID NO: 10): | |
| Protein Sequence | |
| (SEQ ID NO: 39): | |
| SNP Information | |
| Context | |
| (SEQ ID NO: 71): | |

TTTTAGGCGGACCACACCGCCCACAACGGCCACCCCCATAAGGCATAGGC
CAAGACCATACCCGCCGAATGTAGGACAAGAAGCTCTCTCTCAGACAACC
RTCTCATGGGCCCCATTCCAGGACACTTCTGAGTACATCATTTCATGTCA
TCCTGTTGGCACTGATGAAGAACCCTTACAGTTCAGGGTTCCTGGAACTT
C

| | |
|---|---|
| Celera SNP ID: | hCV25592965 |
| Public SNP ID: | rs17449032 |
| SNP in Transcript | SEQ ID NO: 10 |
| Sequence | |
| SNP Position | 6640 |
| Transcript: | |
| SNP Source: | Applera |
| Population (Allele, | caucasian (G, 1\|A, 39) afri- |
| Count): | can american (G, 1\|A, 35) |
| | total (G, 2\|A, 74) |
| SNP Type: | Missense Mutation |
| Protein Coding: | SEQ ID NO: 39, at position |
| | 2090, (I, ATC) (V, GTC) |
| SNP Source: | dbSNP; Applera |
| Population (Allele, | caucasian (A, 110\|G, 6) |
| Count): | |
| SNP Type: | Missense Mutation |
| Protein Coding: | SEQ ID NO: 39, at position |
| | 2090, (I, ATC) (V, GTC) |
| Gene Number: | 3 |
| Celera Gene: | hCG1813428 - 145000147105376 |
| Celera Transcript: | hCT1967471 - 145000147105395 |
| Public Transcript | NM_002026 |
| Accession: | |
| Celera Protein: | hCP1780445 - 197000064940524 |
| Public Protein | NP_002017 |
| Accession: | |
| Gene Symbol: | FN1 |
| Protein Name: | fibronectin 1 |
| Celera Genomic Axis: | GA_x5YUV32VWPT |
| | (20899546 . . . 20995013) |
| Chromosome: | 2 |
| OMIM NUMBER: | 135600 |
| OMIM Information: | ?Ehlers-Danlos syndrome, |
| | type X, 225310 (1) |
| Transcript Sequence | |
| (SEQ ID NO: 11): | |
| Protein Sequence | |
| (SEQ ID NO: 40): | |
| SNP Information | |
| Context | |
| (SEQ ID NO: 72): | |

TTTTAGGCGGACCACACCGCCCACAACGGCCACCCCCATAAGGCATAGGC
CAAGACCATACCCGCCGAATGTAGGACAAGAAGCTCTCTCTCAGACAACC
RTCTCATGGGCCCCATTCCAGGACACTTCTGAGTACATCATTTCATGTCA
TCCTGTTGGCACTGATGAAGAACCCTTACAGTTCAGGGTTCCTGGAACTT
C

| | |
|---|---|
| Celera SNP ID: | hCV25592965 |
| Public SNP ID: | rs17449032 |
| SNP in Transcript | SEQ ID NO: 11 |
| Sequence | |
| SNP Position | 6640 |
| Transcript: | |
| SNP Source: | Applera |
| Population (Allele, | caucasian (G, 1\|A, 39) afri- |
| Count): | can american (G, 1\|A, 35) |
| | total (G, 2\|A, 74) |
| SNP Type: | Missense Mutation |
| Protein Coding: | SEQ ID NO: 40, at position |
| | 2090, (I, ATC) (V, GTC) |
| SNP Source: | dbSNP; Applera |
| Population (Allele, | caucasian (A, 110\|G, 6) |
| Count): | |
| SNP Type: | Missense Mutation |
| Protein Coding: | SEQ ID NO: 40, at position |
| | 2090, (I, ATC) (V, GTC) |
| Gene Number: | 3 |
| Celera Gene: | hCG1813428 - 145000147105376 |
| Celera Transcript: | hCT2303354 - 145000147111922 |
| Public Transcript | |
| Accession: | |
| Celera Protein: | hCP1807895 - 197000064940536 |
| Public Protein | |
| Accession: | |
| Gene Symbol: | FN1 |
| Protein Name: | fibronectin 1 |
| Celera Genomic Axis: | GA_x5YUV32VWPT |
| | (20899546 . . . 20995013) |
| Chromosome: | 2 |
| OMIM NUMBER: | 135600 |
| OMIM Information: | ?Ehlers-Danlos syndrome, |
| | type X, 225310 (1) |
| Transcript Sequence | |
| (SEQ ID NO: 12): | |
| Protein Sequence | |
| (SEQ ID NO: 41): | |
| SNP Information | |
| Context | |
| (SEQ ID NO: 73): | |

CGAATATACAATTTATGTCATTGCCCTGAAGAATAATCAGAAGAGCGAGC
CCCTGATTGGAAGGAAAAAGACAGGACAAGAAGCTCTCTCTCAGACAACC
RTCTCATGGGCCCCATTCCAGGACACTTCTGAGTACATCATTTCATGTCA
TCCTGTTGGCACTGATGAAGAACCCTTACAGTTCAGGGTTCCTGGAACTT
C

| | |
|---|---|
| Celera SNP ID: | hCV25592965 |
| Public SNP ID: | rs17449032 |
| SNP in Transcript | SEQ ID NO: 12 |
| Sequence | |
| SNP Position | 6375 |
| Transcript: | |
| SNP Source: | Applera |
| Population (Allele, | caucasian (G, 1\|A, 39) afri- |
| Count): | can american (G, 1\|A, 35) |
| | total (G, 2\|A, 74) |
| SNP Type: | Missense Mutation |
| Protein Coding: | SEQ ID NO: 41, at position |
| | 1076, (I, ATC) (V, GTC) |
| SNP Source: | dbSNP; Applera |
| Population (Allele, | caucasian (A, 110\|G, 6) |
| Count): | |
| SNP Type: | Missense Mutation |
| Protein Coding: | SEQ ID NO: 41, at position |
| | 1076, (I, ATC) (V, GTC) |
| Gene Number: | 3 |
| Celera Gene: | hCG1813428 - 145000147105376 |
| Celera Transcript: | hCT2303357 - 145000147111610 |
| Public Transcript | |
| Accession: | |
| Celera Protein: | hCP1807894 - 197000064940535 |
| Public Protein | |
| Accession: | |
| Gene Symbol: | FN1 |
| Protein Name: | fibronectin 1 |
| Celera Genomic Axis: | GA_x5YUV32VWPT |
| | (20899546 . . . 20995013) |
| Chromosome: | 2 |
| OMIM NUMBER: | 135600 |
| OMIM Information: | ?Ehlers-Danlos syndrome, |
| | type X, 225310 (1) |
| Transcript Sequence | |
| (SEQ ID NO: 13): | |
| Protein Sequence | |
| (SEQ ID NO: 42): | |
| SNP Information | |
| Context | |
| (SEQ ID NO: 74): | |

TTTTAGGCGGACCACACCGCCCACAACGGCCACCCCCATAAGGCATAGGC
CAAGACCATACCCGCCGAATGTAGGACAAGAAGCTCTCTCTCAGACAACC
RTCTCATGGGCCCCATTCCAGGACACTTCTGAGTACATCATTTCATGTCA
TCCTGTTGGCACTGATGAAGAACCCTTACAGTTCAGGGTTCCTGGAACTT
C

| | |
|---|---|
| Celera SNP ID: | hCV25592965 |
| Public SNP ID: | rs17449032 |
| SNP in Transcript | SEQ ID NO: 13 |
| Sequence | |
| SNP Position | 1522 |
| Transcript: | |
| SNP Source: | Applera |
| Population (Allele, | caucasian (G, 1\|A, 39) afri- |
| Count): | can american (G, 1\|A, 35) |
| | total (G, 2\|A, 74) |
| SNP Type: | Missense Mutation |
| Protein Coding: | SEQ ID NO: 42, at position |
| | 428, (I, ATC) (V, GTC) |
| SNP Source: | dbSNP; Applera |
| Population (Allele, | caucasian (A, 110\|G, 6) |
| Count): | |
| SNP Type: | Missense Mutation |
| Protein Coding: | SEQ ID NO: 42, at position |
| | 428, (I, ATC) (V, GTC) |
| Gene Number: | 3 |
| Celera Gene: | hCG1813428 - 145000147105376 |
| Celera Transcript: | hCT2303362 - 145000147111560 |
| Public Transcript | |
| Accession: | |
| Celera Protein: | hCP1807887 - 197000064940528 |
| Public Protein | |
| Accession: | |
| Gene Symbol: | FN1 |
| Protein Name: | fibronectin 1 |
| Celera Genomic Axis: | GA_x5YUV32VWPT |
| | (20899546 . . . 20995013) |
| Chromosome: | 2 |
| OMIM NUMBER: | 135600 |
| OMIM Information: | ?Ehlers-Danlos syndrome, |
| | type X, 225310 (1) |
| Transcript Sequence | |
| (SEQ ID NO: 14): | |
| Protein Sequence | |
| (SEQ ID NO: 43): | |
| SNP Information | |
| Context | |
| (SEQ ID NO: 75): | |

CGAATATACAATTTATGTCATTGCCCTGAAGAATAATCAGAAGAGCGAGC
CCCTGATTGGAAGGAAAAAGACAGGACAAGAAGCTCTCTCTCAGACAACC
RTCTCATGGGCCCCATTCCAGGACACTTCTGAGTACATCATTTCATGTCA
TCCTGTTGGCACTGATGAAGAACCCTTACAGTTCAGGGTTCCTGGAACTT
C

| | |
|---|---|
| Celera SNP ID: | hCV25592965 |
| Public SNP ID: | rs17449032 |
| SNP in Transcript | SEQ ID NO: 14 |
| Sequence | |
| SNP Position | 6375 |
| Transcript: | |
| SNP Source: | Applera |
| Population (Allele, | caucasian (G, 1\|A, 39) afri- |
| Count): | can american (G, 1\|A, 35) |
| | total (G, 2\|A, 74) |
| SNP Type: | Missense Mutation |
| Protein Coding: | SEQ ID NO: 43, at position |
| | 1076, (I, ATC) (V, GTC) |
| SNP Source: | dbSNP; Applera |
| Population (Allele, | caucasian (A, 110\|G, 6) |
| Count): | |
| SNP Type: | Missense Mutation |
| Protein Coding: | SEQ ID NO: 43, at position |
| | 1076, (I, ATC) (V, GTC) |
| Gene Number: | 3 |
| Celera Gene: | hCG1813428 - 145000147105376 |
| Celera Transcript: | hCT2303365 - 145000147111722 |
| Public Transcript | |
| Accession: | |
| Celera Protein: | hCP1807890 - 197000064940531 |
| Public Protein | |
| Accession: | |
| Gene Symbol: | FN1 |
| Protein Name: | fibronectin 1 |
| Celera Genomic Axis: | GA_x5YUV32VWPT |
| | (20899546 . . . 20995013) |
| Chromosome: | 2 |
| OMIM NUMBER: | 135600 |
| OMIM Information: | ?Ehlers-Danlos syndrome, |
| | type X, 225310 (1) |
| Transcript Sequence | |
| (SEQ ID NO: 15): | |
| Protein Sequence | |
| (SEQ ID NO: 44): | |
| SNP Information | |
| Context | |
| (SEQ ID NO: 76): | |

TTTTAGGCGGACCACACCGCCCACAACGGCCACCCCCATAAGGCATAGGC
CAAGACCATACCCGCCGAATGTAGGACAAGAAGCTCTCTCTCAGACAACC
RTCTCATGGGCCCCATTCCAGGACACTTCTGAGTACATCATTTCATGTCA
TCCTGTTGGCACTGATGAAGAACCCTTACAGTTCAGGGTTCCTGGAACTT
C

| | |
|---|---|
| Celera SNP ID: | hCV25592965 |
| Public SNP ID: | rs17449032 |
| SNP in Transcript | SEQ ID NO: 15 |
| Sequence | |
| SNP Position | 6297 |
| Transcript: | |
| SNP Source: | Applera |
| Population (Allele, | caucasian (G, 1\|A, 39) afri- |
| Count): | can american (G, 1\|A, 35) |
| | total (G, 2\|A, 74) |
| SNP Type: | Missense Mutation |
| Protein Coding: | SEQ ID NO: 44, at position |
| | 1050, (I, ATC) (V, GTC) |
| SNP Source: | dbSNP; Applera |
| Population (Allele, | caucasian (A, 110\|G, 6) |
| Count): | |
| SNP Type: | Missense Mutation |
| Protein Coding: | SEQ ID NO: 44, at position |
| | 1050, (I, ATC) (V, GTC) |
| Gene Number: | 3 |
| Celera Gene: | hCG1813428 - 145000147105376 |
| Celera Transcript: | hCT7733 - 145000147105445 |
| Public Transcript | NM_212476 |
| Accession: | |
| Celera Protein: | hCP33955 - 197000064940525 |
| Public Protein | NP_997641 |
| Accession: | |
| Gene Symbol: | FN1 |
| Protein Name: | fibronectin 1 |
| Celera Genomic Axis: | GA_x5YUV32VWPT |
| | (20899546 . . . 20995013) |
| Chromosome: | 2 |
| OMIM NUMBER: | 135600 |
| OMIM Information: | ?Ehlers-Danlos syndrome, |
| | type X, 225310 (1) |
| Transcript Sequence | |
| (SEQ ID NO: 16): | |
| Protein Sequence | |
| (SEQ ID NO: 45): | |
| SNP Information | |
| Context | |
| (SEQ ID NO: 77): | |

TCACATCCCCAGGGAAGATGTAGACTATCACCTGTACCCACACGGTCCGG
GACTCAATCCAAATGCCTCTACAGGACAAGAAGCTCTCTCTCAGACAACC
RTCTCATGGGCCCCATTCCAGGACACTTCTGAGTACATCATTTCATGTCA
TCCTGTTGGCACTGATGAAGAACCCTTACAGTTCAGGGTTCCTGGAACTT
C

| | |
|---|---|
| Celera SNP ID: | hCV25592965 |
| Public SNP ID: | rs17449032 |
| SNP in Transcript | SEQ ID NO: 16 |
| Sequence | |
| SNP Position | 6463 |
| Transcript: | |
| SNP Source: | Applera |
| Population (Allele, | caucasian (G, 1\|A, 39) afri- |
| Count): | can american (G, 1\|A, 35) |
| | total (G, 2\|A, 74) |
| SNP Type: | Missense Mutation |
| Protein Coding: | SEQ ID NO: 45, at position |
| | 2031, (I, ATC) (V, GTC) |
| SNP Source: | dbSNP; Applera |
| Population (Allele, | caucasian (A, 110\|G, 6) |
| Count): | |
| SNP Type: | Missense Mutation |
| Protein Coding: | SEQ ID NO: 45, at position |
| | 2031, (I, ATC) (V, GTC) |
| Gene Number: | 4 |
| Celera Gene: | hCG20905 - 84000313398873 |
| Celera Transcript: | hCT11987 -84000313398874 |
| Public Transcript | NM_000129 |
| Accession: | |
| Celera Protein: | hCP39487 - 197000064923574 |
| Public Protein | NP_000120 |
| Accession: | |
| Gene Symbol: | F13A1 |
| Protein Name: | coagulation factor XIII, A1 |
| | polypeptide |
| Celera Genomic Axis: | GA_x5YUV32VT9V |
| | (5757995 . . . 5955812) |
| Chromosome: | 6 |
| OMIM NUMBER: | 134570 |
| OMIM Information: | Factor XIIIA deficiency (3) |
| Transcript Sequence | |
| (SEQ ID NO: 17): | |
| Protein Sequence | |
| (SEQ ID NO: 46): | |
| SNP Information | |
| Context | |
| (SEQ ID NO: 78): | |

GTCAGAAACTTCCAGGACCGCCTTTGGAGGCAGAAGAGCAGTTCCACCCA
ATAACTCTAATGCAGCGGAAGATGACCTGCCCACAGTGGAGCTTCAGGGC
KTGGTGCCCCGGGGCGTCAACCTGCAAGAGTTTCTTAATGTCACGAGCGT
TCACCTGTTCAAGGAGAGATGGGACACTAACAAGGTGGACCACCACACTG
A

| | |
|---|---|
| Celera SNP ID: | hCV1639938 |
| Public SNP ID: | rs5985 |
| SNP in Transcript | SEQ ID NO: 17 |
| Sequence | |
| SNP Position | 204 |
| Transcript: | |
| SNP Source: | dbSNP; Celera |
| Population (Allele, | caucasian (G, 92\|T, 28) |
| Count): | |
| SNP Type: | Missense Mutation |
| Protein Coding: | SEQ ID NO: 46, at position |
| | 35, (V, GTG) (L, TTG) |
| Gene Number: | 5 |
| Celera Gene: | hCG27811 - 66000116063099 |
| Celera Transcript: | hCT18953 - 66000116063100 |
| Public Transcript | NM_001168 |
| Accession: | |
| Celera Protein: | hCP43533 - 197000064921779 |
| Public Protein | NP_001159 |
| Accession: | |
| Gene Symbol: | BIRC5 |
| Protein Name: | baculoviral IAP repeat- |
| | containing 5 (survivin) |
| Celera Genomic Axis: | GA_x5YUV32W262 |
| | (13301753 . . . 13333146) |
| Chromosome: | 17 |
| OMIM NUMBER: | |
| OMIM Information: | |
| Transcript Sequence | |
| (SEQ ID NO: 18): | |
| Protein Sequence | |
| (SEQ ID NO: 47): | |
| SNP Information | |
| Context | |
| (SEQ ID NO: 79): | |

ATTAACCCTTGGTGAATTTTTGAAACTGGACAGAGAAAGAGCCAAGAACA
AAATTGCAAAGGAAACCAACAATAAGAAGAAAGAATTTGAGGAAACTGCG
RAGAAAGTGCGCCGTGCCATCGAGCAGCTGGCTGCCATGGATTGAGGCCT
CTGGCCGGAGCTGCCTGGTCCCAGAGTGGCTGCACCACTTCCAGGGTTTA
T

| | |
|---|---|
| Celera SNP ID: | hCV16266313 |
| Public SNP ID: | rs2071214 |
| SNP in Transcript | SEQ ID NO: 18 |
| Sequence | |
| SNP Position | 459 |
| Transcript: | |
| SNP Source: | Applera |
| Population (Allele, | caucasian (A, 35\|G, 3) afri- |
| Count): | can american (A, 30\|G, 0) |
| | total (A, 65\|G, 3) |
| SNP Type: | Missense Mutation |
| Protein Coding: | SEQ ID NO: 47, at position |
| | 129, (K, AAG) (E, GAG) |
| SNP Source: | dbSNP; HapMap; HGBASE |
| Population (Allele, | caucasian (G, 6\|A, 114) |
| Count): | |
| SNP Type: | Missense Mutation |
| Protein Coding: | SEQ ID NO: 47, at position |
| | 129, (K, AAG) (E, GAG) |
| Gene Number: | 5 |
| Celera Gene: | hCG27811 - 66000116063099 |
| Celera Transcript: | hCT1958629 - 66000116063116 |
| Public Transcript | NM_001012271 |
| Accession: | |
| Celera Protein: | hCP1766717 - 197000064921781 |
| Public Protein | NP_001012271 |
| Accession: | |
| Gene Symbol: | BIRC5 |
| Protein Name: | baculoviral IAP repeat- |
| | containing 5 (survivin) |
| Celera Genomic Axis: | GA_x5YUV32W262 |
| | (13301753 . . . 13333146) |
| Chromosome: | 17 |
| OMIM NUMBER: | |
| OMIM Information: | |
| Transcript Sequence | |
| (SEQ ID NO: 19): | |
| Protein Sequence | |
| (SEQ ID NO: 48): | |
| SNP Information | |
| Context | |
| (SEQ ID NO: 80): | |

ATTAACCCTTGGTGAATTTTTGAAACTGGACAGAGAAAGAGCCAAGAACA
AAATTGCAAAGGAAACCAACAATAAGAAGAAAGAATTTGAGGAAACTGCG
RAGAAAGTGCGCCGTGCCATCGAGCAGCTGGCTGCCATGGATTGAGGCCT
CTGGCCGGAGCTGCCTGGTCCCAGAGTGGCTGCACCACTTCCAGGGTTTA
T

| | |
|---|---|
| Celera SNP ID: | hCV16266313 |
| Public SNP ID: | rs2071214 |
| SNP in Transcript | SEQ ID NO: 19 |
| Sequence | |
| SNP Position | 528 |
| Transcript: | |
| SNP Source: | Applera |
| Population (Allele, | caucasian (A, 35\|G, 3) afri- |
| Count): | can american (A, 30\|G, 0) |
| | total (A, 65\|G, 3) |
| SNP Type: | Missense Mutation |
| Protein Coding: | SEQ ID NO: 48, at position |
| | 152, (K, AAG) (E, GAG) |
| SNP Source: | dbSNP; HapMap; HGBASE |
| Population (Allele, | caucasian (G, 6\|A, 114) |
| Count): | |
| SNP Type: | Missense Mutation |
| Protein Coding: | SEQ ID NO: 48, at position |
| | 152, (K, AAG) (E, GAG) |
| Gene Number: | 5 |
| Celera Gene: | hCG27811 - 66000116063099 |
| Celera Transcript: | hCT1962326 - 66000116063125 |
| Public Transcript | NM_001012270 |
| Accession: | |
| Celera Protein: | hCP1778153 - 197000064921782 |
| Public Protein | NP_001012270 |
| Accession: | |
| Gene Symbol: | BIRC5 |
| Protein Name: | baculoviral IAP repeat- |
| | containing 5 (survivin) |
| Celera Genomic Axis: | GA_x5YUV32W262 |
| | (13301753 . . . 13333146) |
| Chromosome: | 17 |
| OMIM NUMBER: | |
| OMIM Information: | |
| Transcript Sequence | |
| (SEQ ID NO: 20): | |
| Protein Sequence | |
| (SEQ ID NO: 49): | |
| SNP Information | |
| Context | |
| (SEQ ID NO: 81): | |

AGTGTTTCTTCTGCTTCAAGGAGCTGGAAGGCTGGGAGCCAGATGACGAC
CCCATGCAAAGGAAACCAACAATAAGAAGAAAGAATTTGAGGAAACTGCG
RAGAAAGTGCGCCGTGCCATCGAGCAGCTGGCTGCCATGGATTGAGGCCT
CTGGCCGGAGCTGCCTGGTCCCAGAGTGGCTGCACCACTTCCAGGGTTTA
T

| | |
|---|---|
| Celera SNP ID: | hCV16266313 |
| Public SNP ID: | rs2071214 |
| SNP in Transcript | SEQ ID NO: 20 |
| Sequence | |
| SNP Position | 341 |
| Transcript: | |
| SNP Source: | Applera |
| Population (Allele, | caucasian (A, 35\|G, 3) afri- |
| Count): | can american (A, 30\|G, 0) |
| | total (A, 65\|G, 3) |
| SNP Type: | Silent Mutation |
| Protein Coding: | SEQ ID NO: 49, at position |
| | 89, (R, CGA) (R, CGG) |
| SNP Source: | dbSNP; HapMap; HGBASE |
| Population (Allele, | caucasian (G, 6\|A, 114) |
| Count): | |
| SNP Type: | Silent Mutation |
| Protein Coding: | SEQ ID NO: 49, at position |
| | 89, (R, CGA) (R, CGG) |
| Gene Number: | 5 |
| Celera Gene: | hCG27811 - 66000116063099 |
| Celera Transcript: | hCT1967440 - 66000116063140 |
| Public Transcript | NM_001168 |
| Accession: | |
| Celera Protein: | hCP1781899 - 197000064921785 |
| Public Protein | NP_001159 |
| Accession: | |
| Gene Symbol: | BIRC5 |
| Protein Name: | baculoviral IAP repeat- |
| | containing 5 (survivin) |
| Celera Genomic Axis: | GA_x5YUV32W262 |
| | (13301753 . . . 13333146) |
| Chromosome: | 17 |
| OMIM NUMBER: | |
| OMIM Information: | |
| Transcript Sequence | |
| (SEQ ID NO: 21): | |
| Protein Sequence | |
| (SEQ ID NO: 50): | |
| SNP Information | |
| Context | |
| (SEQ ID NO: 82): | |

ATTAACCCTTGGTGAATTTTTGAAACTGGACAGAGAAAGAGCCAAGAACA
AAATTGCAAAGGAAACCAACAATAAGAAGAAAGAATTTGAGGAAACTGCG
RAGAAAGTGCGCCGTGCCATCGAGCAGCTGGCTGCCATGGATTGAGGCCT
CTGGCCGGAGCTGCCTGGTCCCAGAGTGGCTGCACCACTTCCAGGGTTTA
T

| | |
|---|---|
| Celera SNP ID: | hCV16266313 |
| Public SNP ID: | rs2071214 |
| SNP in Transcript | SEQ ID NO: 21 |
| Sequence | |
| SNP Position | 459 |
| Transcript: | |
| SNP Source: | Applera |
| Population (Allele, | caucasian (A, 35\|G, 3) afri- |
| Count): | can american (A, 30\|G, 0) |
| | total (A, 65\|G, 3) |
| SNP Type: | Missense Mutation |
| Protein Coding: | SEQ ID NO: 50, at position |
| | 129, (K, AAG) (E, GAG) |
| SNP Source: | dbSNP; HapMap; HGBASE |
| Population (Allele, | caucasian (G, 6\|A, 114) |
| Count): | |
| SNP Type: | Missense Mutation |
| Protein Coding: | SEQ ID NO: 50, at position |
| | 129, (K, AAG) (E, GAG) |
| Gene Number: | 5 |
| Celera Gene: | hCG27811 - 66000116063099 |
| Celera Transcript: | hCT2336835 - 66000116063149 |
| Public Transcript | NM_001012271 |
| Accession: | |
| Celera Protein: | hCP1789145 - 197000064921786 |
| Public Protein | NP_001012271 |
| Accession: | |
| Gene Symbol: | BIRC5 |
| Protein Name: | baculoviral IAP repeat- |
| | containing 5 (survivin) |
| Celera Genomic Axis: | GA_x5YUV32W262 |
| | (13301753 . . . 13333146) |
| Chromosome: | 17 |
| OMIM NUMBER: | |
| OMIM Information: | |
| Transcript Sequence | |
| (SEQ ID NO: 22): | |
| Protein Sequence | |
| (SEQ ID NO: 51): | |
| SNP Information | |
| Context | |
| (SEQ ID NO: 83): | |

ATTAACCCTTGGTGAATTTTTGAAACTGGACAGAGAAAGAGCCAAGAACA
AAATTGCAAAGGAAACCAACAATAAGAAGAAAGAATTTGAGGAAACTGCG
RAGAAAGTGCGCCGTGCCATCGAGCAGCTGGCTGCCATGGATTGAGGCCT
CTGGCCGGAGCTGCCTGGTCCCAGAGTGGCTGCACCACTTCCAGGGTTTA
T

| | |
|---|---|
| Celera SNP ID: | hCV16266313 |
| Public SNP ID: | rs2071214 |
| SNP in Transcript | SEQ ID NO: 22 |
| Sequence | |
| SNP Position | 528 |
| Transcript: | |
| SNP Source: | Applera |
| Population (Allele, | caucasian (A, 35\|G, 3) afri- |
| Count): | can american (A, 30\|G, 0) |
| | total (A, 65\|G, 3) |
| SNP Type: | Missense Mutation |
| Protein Coding: | SEQ ID NO: 51, at position |
| | 152, (K, AAG) (E, GAG) |
| SNP Source: | dbSNP; HapMap; HGBASE |
| Population (Allele, | caucasian (G, 6\|A, 114) |
| Count): | |
| SNP Type: | Missense Mutation |
| Protein Coding: | SEQ ID NO: 51, at position |
| | 152, (K, AAG) (E, GAG) |
| Gene Number: | 5 |
| Celera Gene: | hCG27811 - 66000116063099 |
| Celera Transcript: | hCT2336837 -66000116063132 |
| Public Transcript | NM_001012270 |
| Accession: | |
| Celera Protein: | hCP1789143 - 197000064921784 |
| Public Protein | NP_001012270 |
| Accession: | |
| Gene Symbol: | BIRC5 |
| Protein Name: | baculoviral IAP repeat- |
| | containing 5 (survivin) |
| Celera Genomic Axis: | GA_x5YUV32W262 |
| | (13301753 . . . 13333146) |
| Chromosome: | 17 |
| OMIM NUMBER: | |
| OMIM Information: | |
| Transcript Sequence | |
| (SEQ ID NO: 23): | |
| Protein Sequence | |
| (SEQ ID NO: 52): | |
| SNP Information | |
| Context | |
| (SEQ ID NO: 84): | |

AGTGTTTCTTCTGCTTCAAGGAGCTGGAAGGCTGGGAGCCAGATGACGAC
CCCATGCAAAGGAAACCAACAATAAGAAGAAAGAATTTGAGGAAACTGCG
RAGAAAGTGCGCCGTGCCATCGAGCAGCTGGCTGCCATGGATTGAGGCCT
CTGGCCGGAGCTGCCTGGTCCCAGAGTGGCTGCACCACTTCCAGGGTTTA
T

| | |
|---|---|
| Celera SNP ID: | hCV16266313 |
| Public SNP ID: | rs2071214 |
| SNP in Transcript | SEQ ID NO: 23 |
| Sequence | |
| SNP Position | 341 |
| Transcript: | |
| SNP Source: | Applera |
| Population (Allele, | caucasian (A, 35\|G, 3) afri- |
| Count): | can american (A, 30\|G, 0) |
| | total (A, 65\|G, 3) |
| SNP Type: | Silent Mutation |
| Protein Coding: | SEQ ID NO: 52, at position |
| | 89, (R, CGA) (R, CGG) |
| SNP Source: | dbSNP; HapMap; HGBASE |
| Population (Allele, | caucasian (G, 6\|A, 114) |
| Count): | |
| SNP Type: | Silent Mutation |
| Protein Coding: | SEQ ID NO: 52, at position |
| | 89, (R, CGA) (R, CGG) |
| Gene Number: | 6 |
| Celera Gene: | hCG31572 - 84000314791301 |
| Celera Transcript: | hCT22753 - 84000314791302 |
| Public Transcript | NM_002253 |
| Accession: | |
| Celera Protein: | hCP45382 - 197000069479457 |
| Public Protein | NP_002244 |
| Accession: | |
| Gene Symbol: | KDR |
| Protein Name: | kinase insert domain receptor |
| | (a type III receptor tyrosine |
| | kinase) |
| Celera Genomic Axis: | GA_x5YUV32W7K2 |
| | (3261537 . . . 3328647) |
| Chromosome: | 4 |
| OMIM NUMBER: | 191306 |
| OMIM Information: | Hemangioma, capillary infan- |
| | tile, somatic, 602089 (3) |
| Transcript Sequence | |
| (SEQ ID NO: 24): | |
| Protein Sequence | |
| (SEQ ID NO: 53): | |
| SNP Information | |
| Context | |
| (SEQ ID NO: 85): | |

TGCCATTCCTCCCCCGCATCACATCCACTGGTATTGGCAGTTGGAGGAAG
AGTGCGCCAACGAGCCCAGCCAAGCTGTCTCAGTGACAAACCCATACCCT
YGTGAAGAATGGAGAAGTGTGGAGGACTTCCAGGGAGGAAATAAAATTGA
AGTTAATAAAAATCAATTTGCTCTAATTGAAGGAAAAAACAAAACTGTAA
G

| | |
|---|---|
| Celera SNP ID: | hCV25612213 |
| Public SNP ID: | rs34231037 |
| SNP in Transcript | SEQ ID NO: 24 |
| Sequence | |
| SNP Position | 1746 |
| Transcript: | |
| SNP Source: | Applera |
| Population (Allele, | caucasian (T, 36\|C, 2) afri- |
| Count): | can american (T, 38\|C, 0) |
| | total (T, 74\|C, 2) |
| SNP Type: | Missense Mutation |
| Protein Coding: | SEQ ID NO: 53, at position |
| | 482, (C, TGT) (R, CGT) |
| Gene Number: | 6 |
| Celera Gene: | hCG31572 - 84000314791301 |
| Celera Transcript: | hCT2326452 - 84000314791336 |
| Public Transcript | NM_002253 |
| Accession: | |
| Celera Protein: | hCP1906194 - 197000069479458 |
| Public Protein | NP_002244 |
| Accession: | |
| Gene Symbol: | KDR |
| Protein Name: | kinase insert domain receptor |
| | (a type III receptor tyrosine |
| | kinase) |
| Celera Genomic Axis: | GA_x5YUV32W7K2 |
| | (3261537 . . . 3328647) |
| Chromosome: | 4 |
| OMIM NUMBER: | 191306 |
| OMIM Information: | Hemangioma, capillary infan- |
| | tile, somatic, 602089 (3) |
| Transcript Sequence | |
| (SEQ ID NO: 25): | |
| Protein Sequence | |
| (SEQ ID NO: 54): | |
| SNP Information | |
| Context | |
| (SEQ ID NO: 86): | |

TGCCATTCCTCCCCCGCATCACATCCACTGGTATTGGCAGTTGGAGGAAG
AGTGCGCCAACGAGCCCAGCCAAGCTGTCTCAGTGACAAACCCATACCCT
YGTGAAGAATGGAGAAGTGTGGAGGACTTCCAGGGAGGAAATAAAATTGA
AGTTAATAAAAATCAATTTGCTCTAATTGAAGGAAAAAACAAAACTGTAA
G

| | |
|---|---|
| Celera SNP ID: | hCV25612213 |
| Public SNP ID: | rs34231037 |
| SNP in Transcript | SEQ ID NO: 25 |
| Sequence | |
| SNP Position | 1746 |
| Transcript: | |
| SNP Source: | Applera |
| Population (Allele, | caucasian (T, 36\|C, 2) afri- |
| Count): | can american (T, 38\|C, 0) |
| | total (T, 74\|C, 2) |
| SNP Type: | Missense Mutation |
| Protein Coding: | SEQ ID NO: 54, at position |
| | 482, (C, TGT) (R, CGT) |
| Gene Number: | 6 |
| Celera Gene: | hCG31572 - 84000314791301 |
| Celera Transcript: | hCT2326453 - 84000314791371 |
| Public Transcript | |
| Accession: | |
| Celera Protein: | hCP1906195 - 197000069479459 |
| Public Protein | |
| Accession: | |
| Gene Symbol: | KDR |
| Protein Name: | kinase insert domain receptor |
| | (a type III receptor tyrosine |
| | kinase) |
| Celera Genomic Axis: | GA_x5YIJV32W7K2 |
| | (3261537 . . . 3328647) |
| Chromosome: | 4 |
| OMIM NUMBER: | 191306 |
| OMIM Information: | Hemangioma, capillary infan- |
| | tile, somatic, 602089 (3) |
| Transcript Sequence | |
| (SEQ ID NO: 26): | |
| Protein Sequence | |
| (SEQ ID NO: 55): | |
| SNP Information | |
| Context | |
| (SEQ ID NO: 87): | |

TGCCATTCCTCCCCCGCATCACATCCACTGGTATTGGCAGTTGGAGGAAG
AGTGCGCCAACGAGCCCAGCCAAGCTGTCTCAGTGACAAACCCATACCCT
YGTGAAGAATGGAGAAGTGTGGAGGACTTCCAGGGAGGAAATAAAATTGA
AGTTAATAAAAATCAATTTGCTCTAATTGAAGGAAAAAACAAAACTGTAA
G

| | |
|---|---|
| Celera SNP ID: | hCV25612213 |
| Public SNP ID: | rs34231037 |
| SNP in Transcript | SEQ ID NO: 26 |
| Sequence | |
| SNP Position | 1746 |
| Transcript: | |
| SNP Source: | Applera |
| Population (Allele, | caucasian (T, 36\|C, 2) afri- |
| Count): | can american (T, 38\|C, 0) |
| | total (T, 74\|C, 2) |
| SNP Type: | Missense Mutation |
| Protein Coding: | SEQ ID NO: 55, at position |
| | 482, (C, TGT) (R, CGT) |
| Gene Number: | 7 |
| Celera Gene: | hCG37187 - 146000220350063 |
| Celera Transcript: | hCT28417 - 146000220350064 |
| Public Transcript | NM_000271 |
| Accession: | |
| Celera Protein: | hCP47700 - 197000069426589 |
| Public Protein | NP_000262 |
| Accession: | |
| Gene Symbol: | NPC1 |
| Protein Name: | Nasopharyngeal carcinoma 1 |
| Celera Genomic Axis: | GA_x5YUV32W66L |
| | (2585858 . . . 2660984) |
| Chromosome: | 18 |
| OMIM NUMBER: | 607107 |
| OMIM Information: | {Nasopharyngeal carcinoma 1}, |
| | 161550 (2) |
| Transcript Sequence | |
| (SEQ ID NO: 27): | |
| Protein Sequence | |
| (SEQ ID NO: 56): | |
| SNP Information | |
| Context | |
| (SEQ ID NO: 88): | |

GACGCCTGTAATGCCACCAACTGGATTGAATACATGTTCAATAAGGACAA
TGGACAGGCACCTTTTACCATCACTCCTGTGTTTTCAGATTTTCCAGTCC
RTGGGATGGAGCCCATGAACAATGCCACCAAAGGCTGTGACGAGTCTGTG
GATGAGGTCACAGCACCATGTAGCTGCCAAGACTGCTCTATTGTCTGTGG
C

| | |
|---|---|
| Celera SNP ID: | hCV25472673 |
| Public SNP ID: | rs1805081 |
| SNP in Transcript | SEQ ID NO: 27 |
| Sequence | |
| SNP Position | 767 |
| Transcript: | |
| SNP Source: | dbSNP; Celera; HapMap; |
| | ABI_Val |
| Population (Allele, | caucasian (A, 64\|G, 56) |
| Count): | |
| SNP Type: | Missense Mutation |
| Protein Coding: | SEQ ID NO: 56, at position |
| | 215, (H, CAT) (R, CGT) |
| Gene Number: | 8 |
| Celera Gene: | hCG43681 - 30000035144826 |
| Celera Transcript: | hCT1952761 - 30000035144827 |
| Public Transcript | NM_000595 |
| Accession: | |
| Celera Protein: | hCP1763834 - 30000035144821 |
| Public Protein | NP_000586 |
| Accession: | |
| Gene Symbol: | LTA |
| Protein Name: | lymphotoxin alpha (TNF super- |
| | family, member 1) |
| Celera Genomic Axis: | GA_x5YUV32W6W6 |
| | (4592366 . . . 4614637) |
| Chromosome: | 6 |
| OMIM NUMBER: | 153440 |
| OMIM Information: | {Myocardial infarction, |
| | susceptibility to} (3) |
| Transcript Sequence | |
| (SEQ ID NO: 28): | |
| Protein Sequence | |
| (SEQ ID NO: 57): | |
| SNP Information | |
| Context | |
| (SEQ ID NO: 89): | |

GTTCTGCTGCCTGGGGCCCAGGGGCTCCCTGGTGTTGGCCTCACACCTTC
AGCTGCCCAGACTGCCCGTCAGCACCCCAAGATGCATCTTGCCCACAGCA
MCCTCAAACCTGCTGCTCACCTCATTGGAGACCCCAGCAAGCAGAACTCA
CTGCTCTGGAGAGCAAACACGGACCGTGCCTTCCTCCAGGATGGTTTCTC
C

| | |
|---|---|
| Celera SNP ID: | hCV7514870 |
| Public SNP ID: | rs1041981 |
| SNP in Transcript | SEQ ID NO: 28 |
| Sequence | |
| SNP Position | 437 |
| Transcript: | |
| SNP Source: | dbSNP; HapMap; HGBASE |
| Population (Allele, | caucasian (C, 77\|A, 43) |
| Count): | |
| SNP Type: | Missense Mutation |
| Protein Coding: | SEQ ID NO: 57, at position |
| | 60, (T, ACC) (N, AAC) |
| Gene Number: | 8 |
| Celera Gene: | hCG43681 - 30000035144826 |
| Celera Transcript: | hCT34966 - 30000035144820 |
| Public Transcript | NM_000595 |
| Accession: | |
| Celera Protein: | hCP52117 - 30000035144824 |
| Public Protein | NP_000586 |
| Accession: | |
| Gene Symbol: | LTA |
| Protein Name: | lymphotoxin alpha (TNF super- |
| | family, member 1) |
| Celera Genomic Axis: | GA_x5YUV32W6W6 |
| | (4592366 . . . 4614637) |
| Chromosome: | 6 |
| OMIM NUMBER: | 153440 |
| OMIM Information: | {Myocardial infarction, sus- |
| | ceptibility to} (3) |
| Transcript Sequence | |
| (SEQ ID NO: 29): | |
| Protein Sequence | |
| (SEQ ID NO: 58): | |
| SNP Information | |
| Context | |
| (SEQ ID NO: 90): | |

GTTCTGCTGCCTGGGGCCCAGGGGCTCCCTGGTGTTGGCCTCACACCTTC
AGCTGCCCAGACTGCCCGTCAGCACCCCAAGATGCATCTTGCCCACAGCA
MCCTCAAACCTGCTGCTCACCTCATTGGAGACCCCAGCAAGCAGAACTCA
CTGCTCTGGAGAGCAAACACGGACCGTGCCTTCCTCCAGGATGGTTTCTC
C

| | |
|---|---|
| Celera SNP ID: | hCV7514870 |
| Public SNP ID: | rs1041981 |
| SNP in Transcript | SEQ ID NO: 29 |
| Sequence | |
| SNP Position | 346 |
| Transcript: | |
| SNP Source: | dbSNP; HapMap; HGBASE |
| Population (Allele, | caucasian (C, 77\|A, 43) |
| Count): | |
| SNP Type: | Missense Mutation |
| Protein Coding: | SEQ ID NO: 58, at position |
| | 60, (T, ACC) (N, AAC) |

TABLE 2
Genomic SNP info and associated gene information

| | |
|---|---|
| Gene Number: | 1 |
| Celera Gene: | hCG1789838 - 118000094879268 |
| Gene Symbol: | ABCA1 |
| Protein Name: | ATP-binding cassette, sub- |
| | family A (ABC1), member 1 |
| Celera Genomic Axis: | GA_x5YUV32VU0F |
| | (7748303 . . . 7915441) |
| Chromosome: | 9 |
| OMIM NUMBER: | 600046 |
| OMIM Information: | Tangier disease, 205400 (3); |
| | HDL deficiency, familial, |
| | 604091 (3);/Cerebral amyloid |
| | angiopathy, 105150 (3); {Cor- |
| | onary artery disease in fami- |
| | lial hypercholesterolemia, |
| | protection against}, 143890 |
| | (3) |
| Genomic Sequence | |
| (SEQ ID NO: 91): | |
| SNP Information | |
| Context | |
| (SEQ ID NO: 100): | |

GTGCTTGAAGTTTCTCCAGTGAGCAAGTCTACTCACCAGGATTGGCTTCA
GGATGTCCATGTTGGAACGAAGTACTCGCTCTGCTGCAGCCAGTTTCTCC
YTTGGTAGGCCACAAAGCTCAGAAACTTCTTGGTCACCAAGTTGAATCAT
CTCTTCTGATTTTGATCCATTGCACAGACTTGTCAAATGTAACTGGTAGC
C

| | |
|---|---|
| Celera SNP ID: | hCV2741051 |
| Public SNP ID: | rs2230806 |
| SNP in Genomic | SEQ ID NO: 91 |
| Sequence: | |
| SNP Position | 87575 |
| Genomic: | |
| SNP Source: | Applera |
| Population (Allele, | caucasian (C, 26\|T, 14) afri- |
| Count): | can american (C, 14\|T, 24) |
| | total (C, 40\|T, 38) |
| SNP Type: | MISSENSE MUTATION; ESS; |
| | HUMAN-MOUSE SYNTENIC REGION |
| SNP Source: | HGMD; dbSNP; Celera; HapMap; |
| | HGBASE; CDX_Heart |
| Population (Allele, | caucasian (C, 101\|T, 19) |
| Count): | |
| SNP Type: | MISSENSE MUTATION; ESS; |
| | HUMAN-MOUSE SYNTENIC REGION |
| Context | |
| (SEQ ID NO: 101): | |

CCAACTTTACCATGAGTTGAAAGTACTCCAGGAAACATAAGGATTATTGT
TCATCAAAAAGCTACTAGAACAAAGACAGCGGTTTACCTTGACATTATTT
YTGGTGTCCAGTCCTGTCATAAATCTTCCCAAGCTGTTGAGAAATCGATC
TGCAGAACTGTCCTGTAAACAACAGAAACCTGCCTCAGTTGTGACTGTTC
A

| | |
|---|---|
| Celera SNP ID: | hCV2741104 |
| Public SNP ID: | rs2230808 |
| SNP in Genomic | SEQ ID NO: 91 |
| Sequence: | |
| SNP Position | 29517 |
| Genomic: | |
| SNP Source: | dbSNP; Celera; HapMap; |
| | ABI_Val; HGBASE; CDX_Heart |
| Population (Allele, | caucasian (T, 19\|C, 101) |
| Count): | |
| SNP Type: | MISSENSE MUTATION; HUMAN- |
| | MOUSE SYNTENIC REGION |
| Gene Number: | 2 |
| Celera Gene: | hCG2002097 - 62000133391414 |
| Gene Symbol: | PECAM1 |
| Protein Name: | platelet/endothelial cell ad- |
| | hesion molecule (CD31 |
| | antigen) |
| Celera Genomic Axis: | GA_x5YUV32W3KM |
| | (443325 . . . 554985) |
| Chromosome: | 17 |
| OMIM NUMBER: | 173445 |
| OMIM Information: | |
| Genomic Sequence | |
| (SEQ ID NO: 92): | |
| SNP Information | |
| Context | |
| (SEQ ID NO: 102): | |

TGGATTTAAGAACCGGCAGCTTAGCCTGAGGAATTGCTGTGTTCTGTGGG
AGCAGGGCAGGTTCATAAATAAGTGCACAGAGGTCTTGAAATACAGGGAT
YATCTGTTCTTCTCGGAACATGGATGTCCTTCCAGGGATGTGCATCTGGC
CTTGCTGTCTAAGTTCCATCAAGGGAGCCTTCCGTTCTCTGTAGCGACAA
G

| | |
|---|---|
| Celera SNP ID: | hCV435368 |
| Public SNP ID: | rs2812 |
| SNP in Genomic | SEQ ID NO: 92 |
| Sequence: | |
| SNP Position | 11255 |
| Genomic: | |
| SNP Source: | Applera |
| Population (Allele, | caucasian (C, 13\|T, 17) afri- |
| Count): | can american (C, 15\|T, 21) |
| | total (C, 28\|T, 38) |
| SNP Type: | HUMAN-MOUSE SYNTENIC REGION; |
| | UTR3 |
| SNP Source: | dbSNP; Celera; HapMap; HGBASE |
| Population (Allele, | caucasian (T, 51\|C, 69) |
| Count): | |
| SNP Type: | HUMAN-MOUSE SYNTENIC REGION; |
| | UTR3 |
| Gene Number: | 3 |
| Celera Gene: | hCG1813428 - 145000147105376 |
| Gene Symbol: | FN1 |
| Protein Name: | fibronectin 1 |
| Celera Genomic Axis: | GA_x5YUV32VWPT |
| | (20899546 . . . 20995013) |
| Chromosome: | 2 |
| OMIM NUMBER: | 135600 |
| OMIM Information: | ?Ehlers-Danlos syndrome, type |
| | X, 225310 (1) |
| Genomic Sequence | |
| (SEQ ID NO: 93): | |
| SNP Information | |
| Context | |
| (SEQ ID NO: 103): | |

TGAAGAGAACAATTAATTACCTGTAAGGGTTCTTCATCAGTGCCAACAGG
ATGACATGAAATGATGTACTCAGAAGTGTCCTGGAATGGGGCCCATGAGA
YGGTTGTCTGAGAGAGAGCTTCTTGTCCTGTAGAGGCATTTGGATTGAGT
CCCGGACCGTGTGGGTACAGGTGATAGTCTACATCTTCCCTGGGGATGTG
A

| | |
|---|---|
| Celera SNP ID: | hCV25592965 |
| Public SNP ID: | rs17449032 |
| SNP in Genomic | SEQ ID NO: 93 |
| Sequence: | |
| SNP Position | 21329 |
| Genomic: | |
| SNP Source: | Applera |
| Population (Allele, | caucasian (C, 1\|T, 39) afri- |
| Count): | can american (C, 1\|T, 35) to- |
| | tal (C, 2\|T, 74) |
| SNP Type: | MISSENSE MUTATION; TRANSCRIP- |
| | TION FACTOR BINDING SITE; HU- |
| | MAN-MOUSE SYNTENIC REGION; |
| | INTRON |
| SNP Source: | dbSNP; Applera |
| Population (Allele, | caucasian (T, 110\|C, 6) |
| Count): | |
| SNP Type: | MISSENSE MUTATION; TRANSCRIP- |
| | TION FACTOR BINDING SITE; HU- |
| | MAN-MOUSE SYNTENIC REGION; |
| | INTRON |
| Gene Number: | 4 |
| Celera Gene: | hCG20905 - 84000313398873 |
| Gene Symbol: | F13A1 |
| Protein Name: | coagulation factor XIII, A1 |
| | polypeptide |
| Celera Genomic Axis: | GA_x5YUV32VT9V |
| | (5757995 . . . 5955812) |
| Chromosome: | 6 |
| OMIM NUMBER: | 134570 |
| OMIM Information: | Factor XIIIA deficiency (3) |
| Genomic Sequence | |
| (SEQ ID NO: 94): | |
| SNP Information | |
| Context | |
| (SEQ ID NO: 104): | |

CCTGCAGGGAAGAGGGGCCAGGGCCCGGCTGTGCCTGGACCCAGAGTGGT
GGGGAAGGGGGGTATGCTCATACCTTGCAGGTTGACGCCCCGGGGCACCA
MGCCCTGAAGCTCCACTGTGGGCAGGTCATCTTCCGCTGCATTAGAGTTA
TTGGGTGGAACTGCTCTTCTGCCTCCAAAGGCGGTCCTGGAAGTTTCTGA
C

| | |
|---|---|
| Celera SNP ID: | hCV1639938 |
| Public SNP ID: | rs5985 |
| SNP in Genomic | SEQ ID NO: 94 |
| Sequence: | |
| SNP Position | 185709 |
| Genomic: | |
| SNP Source: | dbSNP; Celera |
| Population (Allele, | caucasian (C, 92\|A, 28) |
| Count): | |
| SNP Type: | MISSENSE MUTATION; HUMAN- |
| | MOUSE SYNTENIC REGION |
| Gene Number: | 5 |
| Celera Gene: | hCG27811 - 66000116063099 |
| Gene Symbol: | BIRC5 |
| Protein Name: | baculoviral IAP repeat- |
| | containing 5 (survivin) |
| Celera Genomic Axis: | GA_x5YIJV32W262 |
| | (13301753 . . . 13333146) |
| Chromosome: | 17 |
| OMIM NUMBER: | |
| OMIM Information: | |
| Genomic Sequence | |
| (SEQ ID NO: 95): | |
| SNP Information | |
| Context | |
| (SEQ ID NO: 105): | |

GGATGTGACTGGGAAGCTCTGGTTTCAGTGTCATGTGTCTATTCTTTATT
TCCAGGCAAAGGAAACCAACAATAAGAAGAAAGAATTTGAGGAAACTGCG
RAGAAAGTGCGCCGTGCCATCGAGCAGCTGGCTGCCATGGATTGAGGCCT
CTGGCCGGAGCTGCCTGGTCCCAGAGTGGCTGCACCACTTCCAGGGTTTA
T

| | |
|---|---|
| Celera SNP ID: | hCV16266313 |
| Public SNP ID: | rs2071214 |
| SNP in Genomic | SEQ ID NO: 95 |
| Sequence: | |
| SNP Position | 19267 |
| Genomic: | |
| SNP Source: | Applera |
| Population (Allele, | caucasian (A, 35\|G, 3) afri- |
| Count): | can american (A, 30\|G, 0) to- |
| | tal (A, 65\|G, 3) |
| SNP Type: | MISSENSE MUTATION; HUMAN- |
| | MOUSE SYNTEMC REGION; SILENT |
| | MUTATION |
| SNP Source: | dbSNP; HapMap; HGBASE |
| Population (Allele, | caucasian (G, 6\|A, 114) |
| Count): | |
| SNP Type: | MISSENSE MUTATION; HUMAN- |
| | MOUSE SYNTENIC REGION; SILENT |
| | MUTATION |
| Gene Number: | 6 |
| Celera Gene: | hCG31572 - 84000314791301 |
| Gene Symbol: | KDR |
| Protein Name: | kinase insert domain receptor |
| | (a type III receptor tyrosine |
| | kinase) |
| Celera Genomic Axis: | GA_x5Y1JV32W7K2 |
| | (3261537 . . . 3328647) |
| Chromosome: | 4 |
| OMIM NUMBER: | 191306 |
| OMIM Information: | Hemangioma, capillary infan- |
| | tile, somatic, 602089 (3) |
| Genomic Sequence | |
| (SEQ ID NO: 96): | |
| SNP Information | |
| Context | |
| (SEQ ID NO: 106): | |

AAACTCACTTTGTTTTTTCCTTCAATTAGAGCAAATTGATTTTTATTAAC
TTCAATTTTATTTCCTCCCTGGAAGTCCTCCACACTTCTCCATTCTTCAC
RAGGGTATGGGTTTGTCACTGAGACAGCTTGGCTATAAGAAAGAGATAAC
AGCGCATATTATGATTTAATTTTTCTTTAATTAGAGTCAAGAGTAAGGAA
A

| | |
|---|---|
| Celera SNP ID: | hCV25612213 |
| Public SNP ID: | rs34231037 |
| SNP in Genomic | SEQ ID NO: 96 |
| Sequence: | |
| SNP Position | 38297 |
| Genomic: | |
| SNP Source: | Applera |
| Population (Allele, | caucasian (A, 36\|G, 2) afri- |
| Count): | can american (A, 38\|G, 0) to- |
| | tal (A, 74\|G, 2) |
| SNP Type: | MISSENSE MUTATION; HUMAN- |
| | MOUSE SYNTEMC REGION |
| Gene Number: | 7 |
| Celera Gene: | hCG37187 - 146000220350063 |
| Gene Symbol: | NPC1 |
| Protein Name: | Nasopharyngeal carcinoma 1 |
| Celera Genomic Axis: | GA_x5YUV32W66L |
| | (2585858 . . . 2660984) |
| Chromosome: | 18 |
| OMIM NUMBER: | 607107 |
| OMIM Information: | {Nasopharyngeal carcinoma 1}, |
| | 161550 (2) |
| Genomic Sequence | |
| (SEQ ID NO: 97): | |
| SNP Information | |
| Context | |
| (SEQ ID NO: 107): | |

GCCACAGACAATAGAGCAGTCTTGGCAGCTACATGGTGCTGTGACCTCAT
CCACAGACTCGTCACAGCCTTTGGTGGCATTGTTCATGGGCTCCATCCCA
YGGACTGGAAAATCTACAGAAAGGAATTGTGTTGAGTACAAATCTCAATT
AAAAACATCCAAAATTTTGTATTATACTTAAACTCAAAGAAAAGCCCACT
G

| | |
|---|---|
| Celera SNP ID: | hCV25472673 |
| Public SNP ID: | rs1805081 |
| SNP in Genomic | SEQ ID NO: 97 |
| Sequence: | |
| SNP Position | 38962 |
| Genomic: | |
| SNP Source: | dbSNP; Celera; HapMap; |
| | ABI_Val |
| Population (Allele, | caucasian (T, 64\|C, 56) |
| Count): | |
| SNP Type: | MISSENSE MUTATION; ESS; |
| | HUMAN-MOUSE SYNTENIC REGION |
| Gene Number: | 8 |
| Celera Gene: | hCG43681 - 30000035144826 |
| Gene Symbol: | LTA |
| Protein Name: | lymphotoxin alpha (TNF super- |
| | family, member 1) |
| Celera Genomic Axis: | GA_x5YUV32W6W6 |
| | (4592366 . . . 4614637) |
| Chromosome: | 6 |
| OMIM NUMBER: | 153440 |
| OMIM Information: | {Myocardial infarction, sus- |
| | ceptibility to} (3) |
| Genomic Sequence | |
| (SEQ ID NO: 98): | |
| SNP Information | |
| Context | |
| (SEQ ID NO: 108): | |

CTCAACTCTGTTCTCCCCTAGGGGCTCCCTGGTGTTGGCCTCACACCTTC
AGCTGCCCAGACTGCCCGTCAGCACCCCAAGATGCATCTTGCCCACAGCA
MCCTCAAACCTGCTGCTCACCTCATTGGTAAACATCCACCTGACCTCCCA
GACATGTCCCCACCAGCTCTCCTCCTACCCCTGCCTCAGGAACCCAAGCA
T

| | |
|---|---|
| Celera SNP ID: | hCV7514870 |
| Public SNP ID: | rs1041981 |
| SNP in Genomic | SEQ ID NO: 98 |
| Sequence: | |
| SNP Position | 10954 |
| Genomic: | |
| SNP Source: | dbSNP; HapMap; HGBASE |
| Population (Allele, | caucasian (C, 77\|A, 43) |
| Count): | |
| SNP Type: | MISSENSE MUTATION; HUMAN- |
| | MOUSE SYNTENIC REGION |
| Gene Number: | 9 |
| Celera Gene: | hCG1642225 |
| Gene Symbol: | |
| Protein Name: | |
| Celera Genomic Axis: | GA_x5YUV32VSLS |
| | (8198662 . . . 8219638) |
| Chromosome: | 1 |
| OMIM NUMBER: | |
| OMIM Information: | |
| Genomic Sequence | |
| (SEQ ID NO: 99): | |
| SNP Information | |
| Context | |
| (SEQ ID NO: 109): | |

AATCATTATCTGAAATGTTTCATTGTAGAAGCAGCAATGTGGGCTCCAAG
TAGATGCAGCAGATCCACATGTCCCTCTGAGGGAAAGCCATGGTGCCAAT
RGGCAAGAACACCATGATGTGCAAGGCCATCCAAGGGCACCTGGAAAACA
ACCCAGCTCTGGAAAAACTGTTGCCTCATATCCAGGGAAATGTGGGCTTT
G

| | |
|---|---|
| Celera SNP ID: | hCV9626088 |
| Public SNP ID: | rs943133 |
| SNP in Genomic | SEQ ID NO: 99 |
| Sequence: | |
| SNP Position | 10164 |
| Genomic: | |
| SNP Source: | dbSNP; HapMap; HGBASE |
| Population (Allele, | caucasian (G, 77\|A, 43) |
| Count): | |
| SNP Type: | UTR5 |

TABLE 3

| | |
|---|---|
| hCV25612213 | SEQ ID NO: 85 |
| hCV25612213 | SEQ ID NO: 86 |
| hCV25612213 | SEQ ID NO: 87 |

TABLE 4

| | |
|---|---|
| hCV25612213 | SEQ ID NO: 106 |

TABLE 5

Primers.

| | Design | | Sequence A (Allele- | Sequence B (Allele- | Sequence C |
|---|---|---|---|---|---|
| Marker | ID | Alleles | specific Primer) | specific Primer) | (Common Primer) |
| hCV16266313 | 105958 | A/G | CACGGCGCACTTTCTT | CACGGCGCACTTTCTC | TGTTTTTTCCTTTGTCATCTTATCT |
| | | | (SEQ ID NO: 110) | (SEQ ID NO: 111) | A |
| | | | | | (SEQ ID NO: 112) |
| hCV1639938 | 1782 | A/C | AGTGGAGCTTCAGGGCT | TGGAGCTTCAGGGCG | CAGTGGAGACAGAGGATGTTTAC |
| | | | (SEQ ID NO: 113) | (SEQ ID NO: 114) | (SEQ ID NO: 115) |
| hCV25472673 | 68287 | C/T | GGACTGATCCTTTCTCGAG | GGACTGATCCTTTCTCGAA | CAATATTTGCTGCACAGAGATAC |
| | | | (SEQ ID NO: 116) | (SEQ ID NO: 117) | (SEQ ID NO: 118) |
| hCV25592965 | 81368 | C/T | TGGGGCCCATGAGAC | ATGGGGCCCATGAGAT | CCCAGGGAAGATGTAGACTATC |
| | | | (SEQ ID NO: 119) | (SEQ ID NO: 120) | (SEQ ID NO: 121) |
| hCV25612213 | 111750 | A/G | ACACTTCTCCATTCTTCACA | CACTTCTCCATTCTTCACG | GAATCTTTTCCTTACTCTTGACTC |
| | | | (SEQ ID NO: 122) | (SEQ ID NO: 123) | TA |
| | | | | | (SEQ ID NO: 124) |
| hCV2741051 | 12312 | C/T | GCAGCCAGTTTCTCCC | TGCAGCCAGTTTCTCCT | CATGAAATGCTTCCAGGTATT |
| | | | (SEQ ID NO: 125) | (SEQ ID NO: 126) | (SEQ ID NO: 127) |
| hCV2741104 | 6650 | C/T | CGGTTTACCTTGACATTATTTC | CGGTTTACCTTGACATTATTTT | GACTGTTGCCCCTTATCTATGT |
| | | | (SEQ ID NO: 128) | (SEQ ID NO: 129) | (SEQ ID NO: 130) |
| hCV435368 | 4736 | T/C | CATGTTCCGAGAAGAACAGATA | TGTTCCGAGAAGAACAGATG | CAACAGCCCCTCTGTATCTC |
| | | | (SEQ ID NO: 131) | (SEQ ID NO: 132) | (SEQ ID NO: 133) |
| hCV7514870 | 556653 | A/C | GAGCAGCAGGTTTGAGGT | GCAGCAGGTTTGAGGG | ACACCACCTGAACGTCTCTT |
| | | | (SEQ ID NO: 134) | (SEQ ID NO: 135) | (SEQ ID NO: 136) |
| hCV9626088 | 42941 | C/T | CATTGTCATTGACTTTACCATC | CATTGTCATTGACTTTACCATT | GTGCCATGAAATACCTGAAA |
| | | | (SEQ ID NO: 137) | (SEQ ID NO: 138) | (SEQ ID NO: 139) |

TABLE 6

| | | | | | | | | | | | p-value |
|---|---|---|---|---|---|---|---|---|---|---|---|
| Marker | Allele | Study 1 | Strata (1) | Design (1) | OR (1) | p-value (1) | Study 2 | Strata (2) | Design (2) | OR (2) | (2) |
| hCV1455653 | T | S12 | M | ALL | 0.7 | 0.039 | S28 | M | ALL | 0.5 | 0.0007 |
| hCV15965459 | T | S12 | sm | ALL | 0.7 | 0.027 | S28 | sm | MI_LS | 0.6 | 0.001 |
| hCV25753038 | C | S12 | ALL | ALL | 1.2 | 0.046 | S28 | ALL | ALL | 1.3 | 0.002 |
| hCV582924 | A | S12 | non sm | ALL | 0.8 | 0.050 | S28 | non sm | ALL | 0.6 | 0.002 |
| hCV16093418 | G | S12 | ALL | ALL | 0.8 | 0.038 | S28 | ALL | ALL | 0.7 | 0.007 |
| hCV25598093 | G | S12 | non sm | ALL | 0.4 | 0.011 | S28 | non sm | MI_LS | 0.3 | 0.008 |
| hCV25601276 | A | S12 | sm | ALL | 0.4 | 0.021 | S28 | sm | ALL | 0.3 | 0.009 |
| hCV15853281 | T | S12 | M | ALL | 1.4 | 0.027 | S28 | M | ALL | 1.4 | 0.014 |
| hCV9626088 | G | S12 | ALL | ALL | 0.8 | 0.002 | S28 | ALL | MI_LS | 0.8 | 0.015 |
| hCV25619464 | A | S12 | sm | ALL | 0.8 | 0.031 | S28 | sm | ALL | 0.8 | 0.016 |
| hCV7429784 | A | S12 | F | ALL | 0.6 | 0.007 | S28 | F | ALL | 0.7 | 0.017 |
| hCV2295013 | A | S12 | M | ALL | 0.7 | 0.046 | S28 | M | ALL | 0.7 | 0.018 |
| hCV3098622 | T | S12 | sm | ALL | 0.8 | 0.042 | S28 | sm | ALL | 0.8 | 0.022 |
| hCV25598461 | G | S28 | F | MI_LS | 1.9 | 0.044 | S12 | F | ALL | 1.9 | 0.025 |
| hCV2628220 | C | S12 | non sm | ALL | 0.8 | 0.047 | S28 | non sm | ALL | 0.7 | 0.030 |
| hCV25982101 | A | S12 | non sm | ALL | 0.6 | 0.043 | S28 | non sm | ALL | 0.6 | 0.031 |
| hCV11626683 | T | S12 | F | ALL | 1.4 | 0.001 | S28 | F | ALL | 1.3 | 0.033 |
| hCV2786283 | T | S12 | ALL | Y_O | 0.8 | 0.010 | S28 | ALL | Y_O | 0.8 | 0.033 |
| hCV16187524 | T | S12 | sm | ALL | 0.8 | 0.036 | S28 | sm | MI_LS | 0.8 | 0.033 |
| hCV8900861 | C | S12 | ALL | Y_O | 1.8 | 0.007 | S28 | ALL | Y_O | 1.7 | 0.035 |
| hCV2691236 | T | S12 | non sm | ALL | 1.7 | 0.011 | S28 | non sm | ALL | 1.6 | 0.037 |
| hCV25623506 | T | S12 | ALL | ALL | 1.5 | 0.009 | S28 | ALL | MI_LS | 1.5 | 0.039 |
| hCV25592204 | T | S12 | M | ALL | 0.7 | 0.009 | S28 | M | ALL | 0.8 | 0.039 |
| hCV378029 | C | S12 | non sm | ALL | 1.4 | 0.039 | S28 | non sm | ALL | 1.5 | 0.040 |
| hCV25764546 | C | S12 | non sm | ALL | 0.7 | 0.010 | S28 | non sm | MI_LS | 0.7 | 0.042 |
| hCV11975563 | C | S12 | sm | ALL | 0.8 | 0.047 | S28 | sm | ALL | 0.8 | 0.042 |
| hCV25998929 | A | S12 | F | ALL | 1.8 | 0.040 | S28 | F | ALL | 1.9 | 0.043 |
| hCV1840838 | G | S12 | sm | ALL | 0.7 | 0.021 | S28 | sm | ALL | 0.7 | 0.045 |
| hCV7440483 | C | S12 | non sm | ALL | 2.9 | 0.008 | | | | | |
| hCV8719648 | G | S12 | F | ALL | 0.7 | 0.009 | | | | | |
| hCV2659022 | G | S12 | ALL | ALL | 0.8 | 0.036 | | | | | |
| hCV1247654 | G | S12 | ALL | ALL | 0.7 | 0.011 | | | | | |
| hCV25639556 | C | S12 | F | ALL | 0.6 | 0.019 | | | | | |
| hCV1975247 | A | S12 | ALL | ALL | 1.4 | 0.034 | | | | | |
| hCV9625694 | G | S28 | non sm | ALL | 1.4 | 0.033 | | | | | |
| hCV2659022 | G | S28 | M | ALL | 0.7 | 0.024 | | | | | |
| hCV25935439 | G | S12 | sm | ALL | 1.3 | 0.042 | | | | | |
| hCV11922961 | T | S12 | ALL | ALL | 1.3 | 0.031 | | | | | |

TABLE 7

| | Gene | | p- | | | |
|---|---|---|---|---|---|---|
| hCG | Name | Marker | value | OR | Mode | Allele |
| hCG33721 | SERPINB2 | hCV11450583 | 0.0304 | 0.7392 | Allelic | G |
| hCG33721 | SERPINB2 | hCV11450583 | 0.0267 | 0.7185 | Allelic | G |
| hCG33721 | SERPINB2 | hCV11450583 | 0.0213 | 0.6780 | Allelic | G |
| hCG2029801 | TCP1 | hCV1361979 | 0.0265 | 1.2566 | Allelic | G |
| hCG2029801 | TCP1 | hCV1361979 | 0.0159 | 1.3094 | Allelic | G |
| hCG2029801 | TCP1 | hCV1361979 | 0.0192 | 1.4958 | Allelic | G |
| hCG2029801 | TCP1 | hCV1361979 | 0.0171 | 1.6123 | Allelic | G |
| hCG2029801 | TCP1 | hCV1361979 | 0.0322 | 1.3920 | Allelic | G |
| hCG2029801 | TCP1 | hCV1361979 | 0.0308 | 1.6738 | Allelic | G |
| hCG24991 | RAB13 | hCV15852472 | 0.0042 | 2.6494 | Allelic | T |
| hCG24991 | RAB13 | hCV15852472 | 0.0197 | 2.4232 | Allelic | T |
| hCG24991 | RAB13 | hCV15852472 | 0.0358 | 2.1604 | Allelic | T |
| hCG24991 | RAB13 | hCV15852472 | 0.0093 | 2.6212 | Allelic | T |
| hCG24991 | RAB13 | hCV15852472 | 0.0440 | 1.6434 | Allelic | T |
| hCG40302 | BAT2 | hCV15874455 | 0.0296 | 0.6475 | Allelic | T |
| hCG40302 | BAT2 | hCV15874455 | 0.0348 | 0.4402 | Allelic | T |
| hCG40302 | BAT2 | hCV15874455 | 0.0260 | 0.4237 | Allelic | T |
| hCG38030 | COLEC12 | hCV15976316 | 0.0073 | 1.6811 | Allelic | T |
| hCG38030 | COLEC12 | hCV15976316 | 0.0297 | 1.3863 | Allelic | T |
| hCG38030 | COLEC12 | hCV15976316 | 0.0095 | 1.6675 | Allelic | T |
| hCG38030 | COLEC12 | hCV15976316 | 0.0181 | 1.4097 | Allelic | T |
| hCG27269 | MBL2 | hCV2336609 | 0.0311 | 1.3735 | Allelic | T |
| hCG27269 | MBL2 | hCV2336609 | 0.0191 | 1.4808 | Allelic | T |
| hCG27269 | MBL2 | hCV2336609 | 0.0129 | 1.4896 | Allelic | T |
| hCG26692 | EDN3 | hCV2506294 | 0.0222 | 0.6843 | Allelic | T |
| hCG26692 | EDN3 | hCV2506294 | 0.0405 | 0.7392 | Allelic | T |
| hCG26692 | EDN3 | hCV2506294 | 0.0121 | 0.6429 | Allelic | T |
| hCG40889 | HF1, HFL1 | hCV2530382 | 0.0163 | 2.0769 | Allelic | G |
| hCG40889 | HF1, HFL1 | hCV2530382 | 0.0215 | 1.6378 | Allelic | G |
| hCG40889 | HF1, HFL1 | hCV2530382 | 0.0218 | 2.0527 | Allelic | G |
| hCG2020552 | LCP1 | hCV25474320 | 0.0356 | 1.5388 | Allelic | T |
| hCG2020552 | LCP1 | hCV25474320 | 0.0338 | 1.7314 | Allelic | T |
| hCG1811178 | PTPRC | hCV25593206 | 0.0495 | 0.2259 | Allelic | G |
| hCG1811178 | PTPRC | hCV25593206 | 0.0462 | 0.2739 | Allelic | G |
| hCG31572 | KDR | hCV25612213 | 0.0201 | 3.3977 | Allelic | G |
| hCG31572 | KDR | hCV25612213 | 0.0431 | 2.7229 | Allelic | G |
| hCG31572 | KDR | hCV25612213 | 0.0001 | 4.3271 | Allelic | G |
| hCG31572 | KDR | hCV25612213 | 0.0047 | 2.4916 | Allelic | G |
| hCG31572 | KDR | hCV25612213 | 0.0474 | 1.7685 | Allelic | G |
| hCG33042 | COL4A2 | hCV25616053 | 0.0449 | 1.7758 | Allelic | G |
| hCG33042 | COL4A2 | hCV25616053 | 0.0133 | 1.8540 | Allelic | G |
| hCG33042 | COL4A2 | hCV25616053 | 0.0449 | 1.7758 | Allelic | G |
| hCG33042 | COL4A2 | hCV25616053 | 0.0133 | 1.8540 | Allelic | G |
| hCG33042 | COL4A2 | hCV25616053 | 0.0441 | 1.6251 | Allelic | G |
| hCG33042 | COL4A2 | hCV25616053 | 0.0092 | 1.9400 | Allelic | G |
| hCG1811009 | WWOX | hCV25654217 | 0.0287 | 0.4393 | Allelic | G |
| hCG1811009 | WWOX | hCV25654217 | 0.0178 | 0.2112 | Allelic | G |
| hCG18119 | GAB3 | hCV25959976 | 0.0333 | 1.5738 | Allelic | G |
| hCG18119 | GAB3 | hCV25959976 | 0.0072 | 1.7911 | Allelic | G |
| hCG18119 | GAB3 | hCV25959976 | 0.0406 | 1.9120 | Allelic | G |
| hCG18119 | GAB3 | hCV25959976 | 0.0022 | 2.4636 | Allelic | G |
| hCG1685787 | ADAM17 | hCV25966774 | 0.0340 | 0.3941 | Allelic | A |
| hCG1685787 | ADAM17 | hCV25966774 | 0.0288 | 0.0000 | Allelic | A |
| hCG1789838 | ABCA1 | hCV2741051 | 0.0173 | 0.6971 | Allelic | T |
| hCG1789838 | ABCA1 | hCV2741051 | 0.0046 | 0.6565 | Allelic | T |
| hCG1789838 | ABCA1 | hCV2741051 | 0.0202 | 0.6919 | Allelic | T |
| hCG2022206 | AGTR1 | hCV3187716 | 0.0090 | 1.3385 | Allelic | C |
| hCG2039388 | AGTR1 | hCV3187716 | 0.0088 | 1.8200 | Allelic | C |
| hCG2022206 | AGTR1 | hCV3187716 | 0.0097 | 1.3715 | Allelic | C |
| hCG2039388 | AGTR1 | hCV3187716 | 0.0038 | 2.0200 | Allelic | C |
| hCG26692 | EDN3 | hCV3223182 | 0.0080 | 1.3038 | Allelic | T |
| hCG26692 | EDN3 | hCV3223182 | 0.0349 | 1.4208 | Allelic | T |
| hCG26692 | EDN3 | hCV3223182 | 0.0063 | 1.6963 | Allelic | T |
| hCG26692 | EDN3 | hCV3223182 | 0.0493 | 1.3358 | Allelic | T |
| hCG26692 | EDN3 | hCV3223182 | 0.0260 | 1.2768 | Allelic | T |
| hCG26692 | EDN3 | hCV3223182 | 0.0126 | 1.5461 | Allelic | T |
| hCG26692 | EDN3 | hCV3223182 | 0.0229 | 1.6345 | Allelic | T |
| hCG43681 | LTA | hCV7514870 | 0.0001 | 0.5809 | Allelic | C |
| hCG43681 | LTA | hCV7514870 | 0.0458 | 0.7192 | Allelic | C |
| hCG43681 | LTA | hCV7514870 | 0.0143 | 0.7296 | Allelic | C |
| hCG43681 | LTA | hCV7514870 | 0.0249 | 0.7472 | Allelic | C |
| hCG43681 | LTA | hCV7514870 | 0.0017 | 0.5016 | Allelic | C |
| hCG43681 | LTA | hCV7514870 | 0.0006 | 0.5146 | Allelic | C |
| hCG43681 | LTA | hCV7514870 | 0.0026 | 0.6318 | Allelic | C |
| hCG43681 | LTA | hCV7514870 | 0.0058 | 0.6819 | Allelic | C |
| hCG43681 | LTA | hCV7514870 | 0.0222 | 0.7297 | Allelic | C |
| hCG23227 | PTPRJ | hCV8895373 | 0.0333 | 1.6632 | Allelic | G |
| hCG23227 | PTPRJ | hCV8895373 | 0.0251 | 1.2927 | Allelic | G |
| hCG33721 | SERPINB2 | hCV8931357 | 0.0003 | 0.6660 | Allelic | G |
| hCG33721 | SERPINB2 | hCV8931357 | 0.0000 | 0.6091 | Allelic | G |
| hCG33721 | SERPINB2 | hCV8931357 | 0.0268 | 0.7214 | Allelic | G |
| hCG33721 | SERPINB2 | hCV8931357 | 0.0323 | 0.6971 | Allelic | G |
| hCG2029091 | SERPINA5 | hCV9596971 | 0.0328 | 0.6700 | Allelic | G |
| hCG2029091 | SERPINA5 | hCV9596971 | 0.0075 | 0.2839 | Allelic | G |
| hCG2029091 | SERPINA5 | hCV9596971 | 0.0286 | 0.3432 | Allelic | G |
| hCG2029091 | SERPINA5 | hCV9596971 | 0.0422 | 0.5739 | Allelic | G |
| hCG2029091 | SERPINA5 | hCV9596971 | 0.0481 | 0.5496 | Allelic | G |
| hCG2029091 | SERPINA5 | hCV9596971 | 0.0328 | 0.6700 | Allelic | G |
| hCG2029091 | SERPINA5 | hCV9596971 | 0.0075 | 0.2839 | Allelic | G |
| hCG2029091 | SERPINA5 | hCV9596971 | 0.0286 | 0.3432 | Allelic | G |
| hCG2029091 | SERPINA5 | hCV9596971 | 0.0422 | 0.5739 | Allelic | G |
| hCG2029091 | SERPINA5 | hCV9596971 | 0.0481 | 0.5496 | Allelic | G |
| hCG2029091 | SERPINA5 | hCV9596971 | 0.0100 | 0.6464 | Allelic | G |
| hCG2029091 | SERPINA5 | hCV9596971 | 0.0045 | 0.6830 | Allelic | G |
| hCG2029091 | SERPINA5 | hCV9596971 | 0.0159 | 0.6258 | Allelic | G |
| hCG2029091 | SERPINA5 | hCV9596971 | 0.0034 | 0.2589 | Allelic | G |
| hCG2029091 | SERPINA5 | hCV9596971 | 0.0449 | 0.3670 | Allelic | G |
| hCG2029091 | SERPINA5 | hCV9596971 | 0.0302 | 0.4565 | Allelic | G |
| hCG2029091 | SERPINA5 | hCV9596971 | 0.0391 | 0.5075 | Allelic | G |
| hCG2029091 | SERPINA5 | hCV9596971 | 0.0080 | 0.4860 | Allelic | G |
| hCG2029091 | SERPINA5 | hCV9596971 | 0.0269 | 0.5036 | Allelic | G |
| hCG2029091 | SERPINA5 | hCV9596971 | 0.0385 | 0.4064 | Allelic | G |

| hCG | Strata | Status Name |
|---|---|---|
| hCG33721 | ALL | STATUS3_ALLCASE_VS_LT75CONTROL |
| hCG33721 | FMHX_No | Pre-CARE |
| hCG33721 | HYPERTEN_Yes | Pre-CARE |
| hCG2029801 | ALL | STATUS_ALLCASE_VS_ALLCONTROL |
| hCG2029801 | ALL | STATUS3_ALLCASE_VS_LT75CONTROL |
| hCG2029801 | AGE_TERTILE_3 | During-CARE |
| hCG2029801 | GLUCOSE_TERTILE_2 | During-CARE |
| hCG2029801 | HYPERTEN_Yes | During-CARE |
| hCG2029801 | SMOKE_No | During-CARE |
| hCG24991 | BMI_TERTILE_2 | COHORT |
| hCG24991 | SMOKE_Yes | COHORT |
| hCG24991 | ALL | STATUS12_LT60CASE_VS_GT75CONTROL |
| hCG24991 | BMI_TERTILE_2 | During-CARE |
| hCG24991 | Male | During-CARE |
| hCG40302 | ALL | STATUS_ALLCASE_VS_ALLCONTROL |
| hCG40302 | SMOKE_Yes | COHORT |
| hCG40302 | SMOKE_Yes | During-CARE |
| hCG38030 | GLUCOSE_TERTILE_2 | COHORT |
| hCG38030 | ALL | STATUS12_LT60CASE_VS_GT75CONTROL |
| hCG38030 | GLUCOSE_TERTILE_2 | During-CARE |
| hCG38030 | GLUCOSE_TERTILE_2 | Pre-CARE |
| hCG27269 | ALL | STATUS_ALLCASE_VS_ALLCONTROL |
| hCG27269 | ALL | STATUS3_ALLCASE_VS_LT75CONTROL |
| hCG27269 | Pravastatin | Pre-CARE |
| hCG26692 | BMI_TERTILE_2 | COHORT |
| hCG26692 | ALL | STATUS12_LT60CASE_VS_GT75CONTROL |
| hCG26692 | BMI_TERTILE_2 | During-CARE |
| hCG40889 | SMOKE_No | COHORT |
| hCG40889 | SMOKE_No | STATUS3_ALLCASE_VS_LT75CONTROL |
| hCG40889 | SMOKE_No | During-CARE |
| hCG2020552 | ALL | STATUS3_ALLCASE_VS_LT75CONTROL |
| hCG2020552 | AGE_TERTILE_2 | During-CARE |
| hCG1811178 | SMOKE_No | STATUS3_ALLCASE_VS_LT75CONTROL |
| hCG1811178 | SMOKE_No | Pre-CARE |
| hCG31572 | ALL | STATUS12_LT60CASE_VS_GT75CONTROL |
| hCG31572 | GLUCOSE_TERTILE_1 | During-CARE |
| hCG31572 | AGE_TERTILE_2 | Pre-CARE |
| hCG31572 | FMHX_Yes | Pre-CARE |
| hCG31572 | HYPERTEN_No | Pre-CARE |
| hCG33042 | GLUCOSE_TERTILE_3 | COHORT |
| hCG33042 | HYPERTEN_No | COHORT |
| hCG33042 | GLUCOSE_TERTILE_3 | COHORT |
| hCG33042 | HYPERTEN_No | COHORT |
| hCG33042 | ALL | STATUS12_LT60CASE_VS_GT75CONTROL |
| hCG33042 | HYPERTEN_No | During-CARE |
| hCG1811009 | SMOKE_No | STATUS3_ALLCASE_VS_LT75CONTROL |
| hCG1811009 | SMOKE_No | Pre-CARE |
| hCG18119 | ALL | STATUS_ALLCASE_VS_ALLCONTROL |
| hCG18119 | ALL | STATUS3_ALLCASE_VS_LT75CONTROL |
| hCG18119 | GLUCOSE_TERTILE_3 | Pre-CARE |
| hCG18119 | Pravastatin | Pre-CARE |
| hCG1685787 | ALL | STATUS3_ALLCASE_VS_LT75CONTROL |
| hCG1685787 | GLUCOSE_TERTILE_1 | Pre-CARE |
| hCG1789838 | Placebo | COHORT |
| hCG1789838 | ALL | STATUS12_LT60CASE_VS_GT75CONTROL |
| hCG1789838 | Placebo | During-CARE |
| hCG2022206 | ALL | STATUS_ALLCASE_VS_ALLCONTROL |
| hCG2039388 | SMOKE_No | COHORT |
| hCG2022206 | ALL | STATUS3_ALLCASE_VS_LT75CONTROL |
| hCG2039388 | SMOKE_No | During-CARE |
| hCG26692 | ALL | STATUS_ALLCASE_VS_ALLCONTROL |
| hCG26692 | BMI_TERTILE_2 | COHORT |
| hCG26692 | SMOKE_Yes | COHORT |
| hCG26692 | ALL | STATUS12_LT60CASE_VS_GT75CONTROL |
| hCG26692 | ALL | STATUS3_ALLCASE_VS_LT75CONTROL |
| hCG26692 | BMI_TERTILE_2 | During-CARE |
| hCG26692 | SMOKE_Yes | During-CARE |
| hCG43681 | ALL | STATUS_ALLCASE_VS_ALLCONTROL |
| hCG43681 | AGE_TERTILE_3 | COHORT |
| hCG43681 | Placebo | COHORT |
| hCG43681 | SMOKE_Yes | COHORT |
| hCG43681 | ALL | STATUS12_LT60CASE_VS_GT75CONTROL |
| hCG43681 | SMOKE_Yes | STATUS3_ALLCASE_VS_LT75CONTROL |
| hCG43681 | ALL | STATUS3_ALLCASE_VS_LT75CONTROL |
| hCG43681 | Placebo | During-CARE |
| hCG43681 | SMOKE_Yes | During-CARE |
| hCG23227 | SMOKE_No | STATUS3_ALLCASE_VS_LT75CONTROL |
| hCG23227 | ALL | Pre-CARE |
| hCG33721 | ALL | STATUS_ALLCASE_VS_ALLCONTROL |
| hCG33721 | ALL | STATUS3_ALLCASE_VS_LT75CONTROL |
| hCG33721 | FMHX_No | Pre-CARE |
| hCG33721 | HYPERTEN_Yes | Pre-CARE |
| hCG2029091 | ALL | COHORT |
| hCG2029091 | AGE_TERTILE_1 | COHORT |
| hCG2029091 | GLUCOSE_TERTILE_2 | COHORT |
| hCG2029091 | Placebo | COHORT |
| hCG2029091 | HYPERTEN_Yes | COHORT |
| hCG2029091 | ALL | COHORT |
| hCG2029091 | AGE_TERTILE_1 | COHORT |
| hCG2029091 | GLUCOSE_TERTILE_2 | COHORT |
| hCG2029091 | Placebo | COHORT |
| hCG2029091 | HYPERTEN_Yes | COHORT |
| hCG2029091 | SMOKE_Yes | STATUS3_ALLCASE_VS_LT75CONTROL |
| hCG2029091 | ALL | STATUS3_ALLCASE_VS_LT75CONTROL |
| hCG2029091 | ALL | During-CARE |
| hCG2029091 | AGE_TERTILE_1 | During-CARE |
| hCG2029091 | GLUCOSE_TERTILE_2 | During-CARE |
| hCG2029091 | BMI_TERTILE_2 | During-CARE |
| hCG2029091 | BMI_TERTILE_3 | During-CARE |
| hCG2029091 | Placebo | During-CARE |
| hCG2029091 | HYPERTEN_Yes | During-CARE |
| hCG2029091 | SMOKE_Yes | During-CARE |

TABLE 8

| hCG | Gene Name | Marker | p-value | OR | Mode | Allele | Strata | Status Name |
|---|---|---|---|---|---|---|---|---|
| hCG37242 | SAH | hCV11181829 | 0.01819 | 2.6459 | Dom | T | ALL | During-CARE |
| hCG37242 | SAH | hCV11181829 | 0.0046 | 3.2161 | Dom | T | FMHX_No | Pre-CARE |
| hCG37242 | SAH | hCV11181829 | 0.01913 | 3.852 | Dom | T | GLUCOSE_TERTILE_1 | Pre-CARE |
| hCG37242 | SAH | hCV11181829 | 0.0285 | 2.246 | Dom | T | Male | Pre-CARE |
| hCG37242 | SAH | hCV11181829 | 0.03191 | 2.3096 | Dom | T | Smoke_Yes | Pre-CARE |
| hCG37242 | SAH | hCV11181829 | 0.03442 | 2.6012 | Dom | T | Placebo | Pre-CARE |
| hCG37892 | PTGIS | hCV11194241 | 0.03162 | 0.5767 | Allelic | T | GLUCOSE_TERTILE_2 | During-CARE |
| hCG37892 | PTGIS | hCV11194241 | 0.04112 | 0.7787 | Dom | T | ALL | Pre-CARE |
| hCG37892 | PTGIS | hCV11194241 | 0.04548 | 0.6584 | Dom | T | GLUCOSE_TERTILE_2 | Pre-CARE |
| hCG41527 | APOL3 | hCV1129436 | 0.02274 | 1.778 | Dom | T | GLUCOSE_TERTILE_1 | During-CARE |
| hCG41527 | APOL3 | hCV1129436 | 0.02356 | 1.8253 | Dom | T | BMI_TERTILE_1 | During-CARE |
| hCG41527 | APOL3 | hCV1129436 | 0.04318 | 1.5513 | Dom | T | Pravastatin | During-CARE |
| hCG41527 | APOL3 | hCV1129436 | 0.01963 | 1.3349 | Dom | T | ALL | Pre-CARE |
| hCG41527 | APOL3 | hCV1129436 | 0.00376 | 1.6341 | Dom | T | Pravastatin | Pre-CARE |
| hCG41527 | APOL3 | hCV1129436 | 0.00223 | 2.0094 | Dom | T | GLUCOSE_TERTILE_1 | Pre-CARE |
| hCG40683 | ITGA2 | hCV11481423 | 0.04893 | 0.3966 | Rec | G | AGE_TERTILE_1 | During-CARE |
| hCG40683 | ITGA2 | hCV11481423 | 0.01069 | 0.6315 | Rec | G | ALL | Pre-CARE |
| hCG14925 | TBXAS1 | hCV11623862 | 0.02701 | 14.8065 | Rec | G | Smoke_No | During-CARE |
| hCG14925 | TBXAS1 | hCV11623862 | 0.0283 | 3.7903 | Dom | G | Smoke_No | Pre-CARE |
| hCG33203 | ITGAE | hCV1243283 | 0.01532 | 1.9732 | Rec | G | Placebo | During-CARE |
| hCG33203 | ITGAE | hCV1243283 | 0.04264 | 1.455 | Allelic | G | BMI_TERTILE_2 | During-CARE |
| hCG33203 | ITGAE | hCV1243283 | 0.01278 | 1.5652 | Rec | G | ALL | Pre-CARE |
| hCG33203 | ITGAE | hCV1243283 | 0.01101 | 2.0735 | Rec | G | BMI_TERTILE_2 | Pre-CARE |
| hCG1811168 | CACNA1E | hCV1432822 | 0.0244 | 0.5485 | Rec | G | FMHX_No | During-CARE |
| hCG1811168 | CACNA1E | hCV1432822 | 0.04447 | 0.5891 | Rec | G | HYPERTEN_No | During-CARE |
| hCG1811168 | CACNA1E | hCV1432822 | 0.04058 | 0.8373 | Allelic | G | ALL | Pre-CARE |
| hCG1811168 | CACNA1E | hCV1432822 | 0.00183 | 0.5881 | Dom | G | FMHX_No | Pre-CARE |
| hCG1811168 | CACNA1E | hCV1432822 | 0.03115 | 0.6946 | Dom | G | HYPERTEN_No | Pre-CARE |
| hCG20851 | LNIR | hCV1459753 | 0.03746 | 1.8689 | Dom | T | BMI_TERTILE_1 | During-CARE |
| hCG20851 | LNIR | hCV1459753 | 0.00311 | 2.0269 | Allelic | T | BMI_TERTILE_1 | Pre-CARE |
| hCG17504 | TAP1 | hCV15746839 | 0.00335 | 21.6197 | Rec | A | ALL | During-CARE |
| hCG17504 | TAP1 | hCV15746839 | 0.04091 | 12.6 | Rec | A | AGE_TERTILE_3 | During-CARE |
| hCG17504 | TAP1 | hCV15746839 | 0.0404 | 2.4 | Dom | A | AGE_TERTILE_3 | Pre-CARE |
| hCG16114 | CCR8 | hCV15824045 | 0.04708 | 0.604 | Dom | G | AGE_TERTILE_1 | During-CARE |
| hCG16114 | CCR8 | hCV15824045 | 0.03528 | 0.5842 | Dom | G | AGE_TERTILE_1 | Pre-CARE |
| hCG2033729 | ICAM3, MGC19604 | hCV15852601 | 0.04129 | 3.1336 | Rec | G | ALL | During-CARE |
| hCG2033729 | ICAM3, MGC19604 | hCV15852601 | 0.00415 | 12.3445 | Rec | G | HYPERTEN_No | Pre-CARE |
| hCG2033729 | ICAM3, MGC19604 | hCV15852601 | 0.02325 | 12.9635 | Rec | G | FMHX_Yes | Pre-CARE |
| hCG2033729 | ICAM3, MGC19604 | hCV15852601 | 0.02811 | 8.4231 | Rec | G | GLUCOSE_TERTILE_2 | Pre-CARE |
| hCG2033729 | ICAM3, MGC19604 | hCV15852601 | 0.02844 | 5.4503 | Rec | G | Male | Pre-CARE |
| hCG37690 | CDA | hCV15949699 | 0.02403 | 0.5678 | Dom | C | AGE_TERTILE_1 | During-CARE |
| hCG37690 | CDA | hCV15949699 | 0.03674 | 0.8254 | Allelic | C | ALL | Pre-CARE |
| hCG22888 | RAGE | hCV15954570 | 0.00314 | 2.2178 | Rec | A | ALL | During-CARE |
| hCG22888 | RAGE | hCV15954570 | 0.00979 | 2.7268 | Rec | A | Pravastatin | During-CARE |
| hCG22888 | RAGE | hCV15954570 | 0.00432 | 2.7105 | Rec | A | FMHX_No | During-CARE |
| hCG22888 | RAGE | hCV15954570 | 0.02059 | 2.4681 | Dom | A | Female | Pre-CARE |
| hCG22888 | RAGE | hCV15954570 | 0.02311 | 1.3819 | Allelic | A | Pravastatin | Pre-CARE |
| hCG22888 | RAGE | hCV15954570 | 0.02636 | 1.4284 | Dom | A | FMHX_No | Pre-CARE |
| hCG22888 | RAGE | hCV15954570 | 0.027 | 1.4253 | Dom | A | HYPERTEN_No | Pre-CARE |
| hCG22888 | RAGE | hCV15954570 | 0.03019 | 1.3848 | Dom | A | Smoke_Yes | Pre-CARE |
| hCG38030 | COLEC12 | hCV15976316 | 0.00947 | 1.6675 | Allelic | T | GLUCOSE_TERTILE_2 | During-CARE |
| hCG38030 | COLEC12 | hCV15976316 | 0.01808 | 1.4097 | Allelic | T | GLUCOSE_TERTILE_2 | Pre-CARE |
| hCG21784 | LAMA2 | hCV16047108 | 0.01961 | 1.5764 | Dom | G | ALL | During-CARE |
| hCG21784 | LAMA2 | hCV16047108 | 0.01458 | 18.0233 | Rec | G | GLUCOSE_TERTILE_2 | During-CARE |
| hCG21784 | LAMA2 | hCV16047108 | 0.0388 | 1.8168 | Dom | G | GLUCOSE_TERTILE_2 | Pre-CARE |
| hCG43681 | LTA | hCV16172087 | 0.02538 | 15.0795 | Rec | C | AGE_TERTILE_1 | During-CARE |
| hCG43681 | LTA | hCV16172087 | 0.01038 | 2.2 | Dom | C | AGE_TERTILE_1 | Pre-CARE |
| hCG27811 | BIRC5 | hCV16266313 | 0.02608 | 1.601 | Dom | G | ALL | During-CARE |
| hCG27811 | BIRC5 | hCV16266313 | 0.00015 | 3.4531 | Dom | G | AGE_TERTILE_3 | During-CARE |
| hCG27811 | BIRC5 | hCV16266313 | 0.00272 | 3.1948 | Dom | G | Smoke_No | During-CARE |
| hCG27811 | BIRC5 | hCV16266313 | 0.00525 | 2.6022 | Allelic | G | GLUCOSE_TERTILE_3 | During-CARE |
| hCG27811 | BIRC5 | hCV16266313 | 0.00745 | 2.2955 | Dom | G | BMI_TERTILE_2 | During-CARE |
| hCG27811 | BIRC5 | hCV16266313 | 0.02785 | 1.6231 | Dom | G | Male | During-CARE |
| hCG27811 | BIRC5 | hCV16266313 | 0.0296 | 1.8335 | Dom | G | Placebo | During-CARE |
| hCG27811 | BIRC5 | hCV16266313 | 0.03324 | 1.9616 | Dom | G | FMHX_Yes | During-CARE |
| hCG27811 | BIRC5 | hCV16266313 | 0.03883 | 2.1011 | Dom | G | GLUCOSE_TERTILE_1 | During-CARE |
| hCG27811 | BIRC5 | hCV16266313 | 0.00124 | 4.2532 | Dom | G | Female | Pre-CARE |
| hCG27811 | BIRC5 | hCV16266313 | 0.00485 | 2.0006 | Dom | G | Placebo | Pre-CARE |
| hCG27811 | BIRC5 | hCV16266313 | 0.00613 | 2.0933 | Allelic | G | AGE_TERTILE_2 | Pre-CARE |
| hCG27811 | BIRC5 | hCV16266313 | 0.01018 | 2.1607 | Dom | G | GLUCOSE_TERTILE_1 | Pre-CARE |
| hCG27811 | BIRC5 | hCV16266313 | 0.0149 | 1.5129 | Allelic | G | ALL | Pre-CARE |
| hCG27811 | BIRC5 | hCV16266313 | 0.01499 | 1.9766 | Allelic | G | BMI_TERTILE_1 | Pre-CARE |
| hCG27811 | BIRC5 | hCV16266313 | 0.02147 | 1.6815 | Dom | G | FMHX_No | Pre-CARE |
| hCG27811 | BIRC5 | hCV16266313 | 0.02966 | 1.6063 | Allelic | G | Smoke_Yes | Pre-CARE |
| hCG27811 | BIRC5 | hCV16266313 | 0.03938 | 1.8321 | Allelic | G | GLUCOSE_TERTILE_2 | Pre-CARE |
| hCG20905 | F13A1, FLJ33708 | hCV1639938 | 0.03456 | 0.6743 | Allelic | C | Pravastatin | During-CARE |
| hCG20905 | F13A1, FLJ33708 | hCV1639938 | 0.0125 | 0.6988 | Allelic | C | Pravastatin | Pre-CARE |
| hCG23161 | MPL | hCV1770462 | 0.04735 | 2.387 | Allelic | G | GLUCOSE_TERTILE_1 | During-CARE |
| hCG23161 | MPL | hCV1770462 | 0.00165 | 3.6287 | Dom | G | GLUCOSE_TERTILE_1 | Pre-CARE |
| hCG39430 | CRP | hCV177490 | 0.0252 | 1.5463 | Dom | G | ALL | During-CARE |
| hCG39430 | CRP | hCV177490 | 0.03131 | 5.3333 | Rec | G | Smoke_Yes | Pre-CARE |
| hCG39430 | CRP | hCV177490 | 0.04799 | 9.8378 | Rec | G | AGE_TERTILE_3 | Pre-CARE |
| hCG14759 | CD86 | hCV22271672 | 0.02302 | 15.5957 | Rec | G | BMI_TERTILE_1 | During-CARE |
| hCG14759 | CD86 | hCV22271672 | 0.01529 | 1.4858 | Dom | G | ALL | Pre-CARE |
| hCG22159 | PDGFRA | hCV22271841 | 0.0209 | 3.2843 | Rec | T | ALL | During-CARE |
| hCG22159 | PDGFRA | hCV22271841 | 0.001 | 9.6964 | Rec | T | Placebo | During-CARE |
| hCG22159 | PDGFRA | hCV22271841 | 0.0267 | 8.514 | Rec | T | Placebo | Pre-CARE |
| hCG22159 | PDGFRA | hCV22271841 | 0.03278 | 13.8571 | Rec | T | Female | Pre-CARE |
| hCG1978757 | SERPINB8 | hCV22273670 | 0.01298 | 18.648 | Rec | G | GLUCOSE_TERTILE_2 | During-CARE |
| hCG1978757 | SERPINB8 | hCV22273670 | 0.02551 | 5.6563 | Rec | G | GLUCOSE_TERTILE_2 | Pre-CARE |
| hCG1643976 | MC3R | hCV22274632 | 0.03609 | 1.439 | Dom | C | ALL | During-CARE |
| hCG1643976 | MC3R | hCV22274632 | 0.02796 | 1.8758 | Dom | C | AGE_TERTILE_2 | During-CARE |
| hCG1643976 | MC3R | hCV22274632 | 0.01439 | 1.9105 | Dom | C | AGE_TERTILE_2 | Pre-CARE |
| hCG40683 | ITGA2 | hCV2390370 | 0.04893 | 0.3966 | Rec | T | AGE_TERTILE_1 | During-CARE |
| hCG40683 | ITGA2 | hCV2390370 | 0.01076 | 0.6289 | Rec | T | ALL | Pre-CARE |
| hCG36908 | SLC11A2 | hCV2404043 | 0.02151 | 2.3549 | Allelic | T | GLUCOSE_TERTILE_1 | During-CARE |
| hCG36908 | SLC11A2 | hCV2404043 | 0.01348 | 15.4348 | Rec | T | GLUCOSE_TERTILE_1 | Pre-CARE |
| hCG38869 | ECE1 | hCV2464666 | 0.00545 | 3.8607 | Rec | G | ALL | During-CARE |
| hCG38869 | ECE1 | hCV2464666 | 0.01529 | 14.8419 | Rec | G | AGE_TERTILE_2 | Pre-CARE |
| hCG38869 | ECE1 | hCV2464666 | 0.02808 | 9.5333 | Rec | G | Female | Pre-CARE |
| hCG38869 | ECE1 | hCV2464666 | 0.04546 | 1.9717 | Allelic | G | Smoke_Yes | Pre-CARE |
| hCG25068 | NPPA | hCV2482592 | 0.04858 | 1.5821 | Allelic | G | BMI_TERTILE_1 | During-CARE |
| hCG25068 | NPPA | hCV2482592 | 0.02338 | 1.6922 | Dom | G | FMHX_Yes | During-CARE |
| hCG25068 | NPPA | hCV2482592 | 0.0414 | 1.5044 | Allelic | G | BMI_TERTILE_1 | Pre-CARE |
| hCG25068 | NPPA | hCV2482592 | 0.02394 | 1.5549 | Dom | G | FMHX_Yes | Pre-CARE |
| hCG37187 | NPC1 | hCV25472673 | 0.00834 | 1.4341 | Allelic | T | Placebo | During-CARE |
| hCG37187 | NPC1 | hCV25472673 | 0.0325 | 1.6625 | Rec | T | Placebo | Pre-CARE |
| hCG2026185 | none | hCV25472944 | 0.03529 | 1.5498 | Allelic | C | GLUCOSE_TERTILE_2 | During-CARE |
| hCG2026185 | none | hCV25472944 | 0.03318 | 2.0096 | Rec | C | GLUCOSE_TERTILE_2 | Pre-CARE |
| hCG1813428 | FN1 | hCV25592965 | 0.03742 | 13.0158 | Rec | T | ALL | During-CARE |
| hCG1813428 | FN1 | hCV25592965 | 0.02519 | 15.1192 | Rec | T | AGE_TERTILE_1 | During-CARE |
| hCG1813428 | FN1 | hCV25592965 | 0.00213 | 4.5272 | Dom | T | AGE_TERTILE_1 | Pre-CARE |
| hCG25049 | SLC21A3 | hCV25605897 | 0.01157 | 0.3192 | Dom | T | Pravastatin | During-CARE |
| hCG25049 | SLC21A3 | hCV25605897 | 0.00019 | 0.437 | Allelic | T | ALL | Pre-CARE |
| hCG25049 | SLC21A3 | hCV25605897 | 0.00273 | 0.3812 | Allelic | T | Pravastatin | Pre-CARE |
| hCG27613 | TBC1D8 | hCV25607108 | 0.00984 | 1.5692 | Rec | G | ALL | During-CARE |
| hCG27613 | TBC1D8 | hCV25607108 | 0.00811 | 2.1316 | Rec | G | BMI_TERTILE_3 | During-CARE |
| hCG27613 | TBC1D8 | hCV25607108 | 0.02607 | 1.82 | Rec | G | BMI_TERTILE_3 | Pre-CARE |
| hCG27991 | SLC10A2 | hCV25608818 | 0.03768 | 12.9802 | Rec | G | ALL | During-CARE |
| hCG27991 | SLC10A2 | hCV25608818 | 0.04518 | 4.2424 | Dom | G | Smoke_Yes | Pre-CARE |
| hCG38060 | LBP | hCV25617571 | 0.0407 | 6.1429 | Rec | T | GLUCOSE_TERTILE_2 | During-CARE |
| hCG38060 | LBP | hCV25617571 | 0.01874 | 13.9354 | Rec | T | GLUCOSE_TERTILE_2 | Pre-CARE |
| hCG38107 | HNF4A, FLJ39654 | hCV25618313 | 0.04162 | 1.7593 | Dom | T | ALL | During-CARE |
| hCG38107 | HNF4A, FLJ39654 | hCV25618313 | 0.02774 | 2.1086 | Dom | T | Placebo | During-CARE |
| hCG38107 | HNF4A, FLJ39654 | hCV25618313 | 0.02483 | 2.1161 | Dom | T | Placebo | Pre-CARE |
| hCG38107 | HNF4A, FLJ39654 | hCV25618313 | 0.02845 | 14.4834 | Rec | T | AGE_TERTILE_1 | Pre-CARE |
| hCG38107 | HNF4A, FLJ39654 | hCV25618313 | 0.03253 | 2.1809 | Dom | T | AGE_TERTILE_3 | Pre-CARE |
| hCG38891 | ABCC6 | hCV25620774 | 0.03198 | 2.1217 | Dom | T | ALL | During-CARE |
| hCG38891 | ABCC6 | hCV25620774 | 0.00662 | 7.7 | Dom | T | Smoke_No | Pre-CARE |
| hCG41170 | UQCRC1 | hCV25627205 | 0.0248 | 15.2013 | Rec | T | AGE_TERTILE_1 | During-CARE |
| hCG41170 | UQCRC1 | hCV25627205 | 0.04413 | 2.4083 | Dom | T | AGE_TERTILE_1 | Pre-CARE |
| hCG41774 | LAMA5 | hCV25629492 | 0.01859 | 0.6071 | Dom | G | Pravastatin | During-CARE |
| hCG41774 | LAMA5 | hCV25629492 | 0.03508 | 0.7023 | Dom | G | Pravastatin | Pre-CARE |
| hCG96721 | LAMB2 | hCV25630499 | 0.03756 | 12.996 | Rec | T | ALL | During-CARE |
| hCG96721 | LAMB2 | hCV25630499 | 0.02516 | 15.086 | Rec | T | Smoke_Yes | During-CARE |
| hCG96721 | LAMB2 | hCV25630499 | 0.02804 | 14.5245 | Rec | T | HYPERTEN_No | During-CARE |
| hCG96721 | LAMB2 | hCV25630499 | 0.03716 | 13.0664 | Rec | T | FMHX_No | During-CARE |
| hCG96721 | LAMB2 | hCV25630499 | 0.03999 | 12.6796 | Rec | T | Male | During-CARE |
| hCG96721 | LAMB2 | hCV25630499 | 0.01389 | 15.2128 | Rec | T | HYPERTEN_No | Pre-CARE |
| hCG96721 | LAMB2 | hCV25630499 | 0.01645 | 14.5181 | Rec | T | BMI_TERTILE_3 | Pre-CARE |
| hCG96721 | LAMB2 | hCV25630499 | 0.02132 | 2.3877 | Allelic | T | Smoke_Yes | Pre-CARE |
| hCG96721 | LAMB2 | hCV25630499 | 0.02525 | 8.6 | Rec | T | ALL | Pre-CARE |
| hCG96721 | LAMB2 | hCV25630499 | 0.02867 | 14.4437 | Rec | T | AGE_TERTILE_1 | Pre-CARE |
| hCG96721 | LAMB2 | hCV25630499 | 0.03084 | 8.1341 | Rec | T | Male | Pre-CARE |
| hCG14819 | CYP1B1 | hCV25632546 | 0.00233 | 5.279 | Dom | T | ALL | During-CARE |
| hCG14819 | CYP1B1 | hCV25632546 | 0.00113 | 15.6289 | Dom | T | GLUCOSE_TERTILE_3 | During-CARE |
| hCG14819 | CYP1B1 | hCV25632546 | 0.00226 | 6.1731 | Dom | T | HYPERTEN_No | During-CARE |
| hCG14819 | CYP1B1 | hCV25632546 | 0.003 | 8.7442 | Dom | T | AGE_TERTILE_3 | During-CARE |
| hCG14819 | CYP1B1 | hCV25632546 | 0.00398 | 6.8127 | Dom | T | Smoke_Yes | During-CARE |
| hCG14819 | CYP1B1 | hCV25632546 | 0.00937 | 5.1 | Allelic | T | Male | During-CARE |
| hCG14819 | CYP1B1 | hCV25632546 | 0.01323 | 8.7733 | Allelic | T | FMHX_No | During-CARE |
| hCG14819 | CYP1B1 | hCV25632546 | 0.01688 | 6.8349 | Allelic | T | Pravastatin | During-CARE |
| hCG14819 | CYP1B1 | hCV25632546 | 0.02412 | 15.4615 | Dom | T | Female | During-CARE |
| hCG14819 | CYP1B1 | hCV25632546 | 0.02519 | 15.1192 | Rec | T | AGE_TERTILE_1 | During-CARE |
| hCG14819 | CYP1B1 | hCV25632546 | 0.03153 | 5.7465 | Dom | T | Placebo | During-CARE |
| hCG14819 | CYP1B1 | hCV25632546 | 0.03474 | 8.7073 | Dom | T | BMI_TERTILE_2 | During-CARE |
| hCG14819 | CYP1B1 | hCV25632546 | 0.03951 | 5.0653 | Allelic | T | BMI_TERTILE_3 | During-CARE |
| hCG14819 | CYP1B1 | hCV25632546 | 0.00135 | 9.5565 | Dom | T | Smoke_No | Pre-CARE |
| hCG14819 | CYP1B1 | hCV25632546 | 0.00648 | 7.161 | Dom | T | Placebo | Pre-CARE |
| hCG14819 | CYP1B1 | hCV25632546 | 0.00823 | 5.4088 | Dom | T | HYPERTEN_Yes | Pre-CARE |
| hCG14819 | CYP1B1 | hCV25632546 | 0.01892 | 9.4038 | Dom | T | GLUCOSE_TERTILE_1 | Pre-CARE |
| hCG14819 | CYP1B1 | hCV25632546 | 0.03278 | 13.8571 | Dom | T | Female | Pre-CARE |
| hCG14819 | CYP1B1 | hCV25632546 | 0.04573 | 2.5706 | Dom | T | ALL | Pre-CARE |
| hCG15079 | LAPTM5 | hCV25632652 | 0.0106 | 1.4312 | Dom | T | ALL | During-CARE |
| hCG15079 | LAPTM5 | hCV25632652 | 0.04595 | 1.5619 | Dom | T | FMHX_Yes | During-CARE |
| hCG15079 | LAPTM5 | hCV25632652 | 0.02209 | 2.3892 | Rec | T | FMHX_Yes | Pre-CARE |
| hCG15079 | LAPTM5 | hCV25632652 | 0.03614 | 2.3746 | Rec | T | AGE_TERTILE_1 | Pre-CARE |
| hCG17143 | APRG1, ITGA9 | hCV25644901 | 0.03779 | 12.9645 | Rec | G | ALL | During-CARE |
| hCG17143 | APRG1, ITGA9 | hCV25644901 | 0.02426 | 2.1375 | Dom | G | BMI_TERTILE_3 | Pre-CARE |
| hCG2039603 | IL16 | hCV25646461 | 0.02265 | 15.6809 | Rec | T | BMI_TERTILE_1 | During-CARE |
| hCG2039603 | IL16 | hCV25646461 | 0.01077 | 2.0246 | Dom | T | BMI_TERTILE_1 | Pre-CARE |
| hCG1644130 | HLA-DPA1 | hCV25651174 | 0.02954 | 1.4094 | Allelic | G | Pravastatin | During-CARE |
| hCG1644130 | HLA-DPA1 | hCV25651174 | 0.0369 | 1.4164 | Dom | G | Pravastatin | Pre-CARE |
| hCG1766487 | PPOX | hCV25652722 | 0.03831 | 12.8958 | Rec | G | ALL | During-CARE |
| hCG1766487 | PPOX | hCV25652722 | 0.00523 | 6.4074 | Allelic | G | BMI_TERTILE_2 | During-CARE |
| hCG1766487 | PPOX | hCV25652722 | 0.02049 | 3.2448 | Dom | G | HYPERTEN_No | During-CARE |
| hCG1766487 | PPOX | hCV25652722 | 0.02558 | 15.0403 | Rec | G | AGE_TERTILE_1 | During-CARE |
| hCG1766487 | PPOX | hCV25652722 | 0.02619 | 14.8894 | Rec | G | Pravastatin | During-CARE |
| hCG1766487 | PPOX | hCV25652722 | 0.03924 | 12.7874 | Rec | G | FMHX_No | During-CARE |
| hCG1766487 | PPOX | hCV25652722 | 0.04082 | 12.5751 | Rec | G | Male | During-CARE |
| hCG1766487 | PPOX | hCV25652722 | 0.00798 | 5.4416 | Dom | G | HYPERTEN_Yes | Pre-CARE |
| hCG1766487 | PPOX | hCV25652722 | 0.01527 | 5.8545 | Dom | G | AGE_TERTILE_3 | Pre-CARE |
| hCG1766487 | PPOX | hCV25652722 | 0.0201 | 4.7583 | Dom | G | GLUCOSE_TERTILE_3 | Pre-CARE |
| hCG1766487 | PPOX | hCV25652722 | 0.02391 | 2.614 | Dom | G | ALL | Pre-CARE |
| hCG1766487 | PPOX | hCV25652722 | 0.02482 | 5.7 | Dom | G | BMI_TERTILE_1 | Pre-CARE |
| hCG1766487 | PPOX | hCV25652722 | 0.03648 | 5.15 | Dom | G | FMHX_Yes | Pre-CARE |
| hCG1766487 | PPOX | hCV25652722 | 0.03828 | 2.7281 | Dom | G | Male | Pre-CARE |
| hCG1766487 | PPOX | hCV25652722 | 0.04651 | 2.815 | Dom | G | Placebo | Pre-CARE |
| hCG24742 | KIAA0329 | hCV25751017 | 0.00921 | 2.1711 | Dom | A | ALL | During-CARE |
| hCG24742 | KIAA0329 | hCV25751017 | 0.00253 | 3.9186 | Dom | A | AGE_TERTILE_1 | During-CARE |
| hCG24742 | KIAA0329 | hCV25751017 | 0.0039 | 2.7196 | Dom | A | Placebo | During-CARE |
| hCG24742 | KIAA0329 | hCV25751017 | 0.00874 | 2.631 | Dom | A | Smoke_Yes | During-CARE |
| hCG24742 | KIAA0329 | hCV25751017 | 0.01075 | 2.2594 | Dom | A | Male | During-CARE |
| hCG24742 | KIAA0329 | hCV25751017 | 0.013 | 3.1818 | Dom | A | BMI_TERTILE_3 | During-CARE |
| hCG24742 | KIAA0329 | hCV25751017 | 0.01342 | 2.6187 | Dom | A | HYPERTEN_No | During-CARE |
| hCG24742 | KIAA0329 | hCV25751017 | 0.04159 | 2.4498 | Dom | A | FMHX_Yes | During-CARE |
| hCG24742 | KIAA0329 | hCV25751017 | 0.04823 | 2.8762 | Dom | A | GLUCOSE_TERTILE_2 | During-CARE |
| hCG24742 | KIAA0329 | hCV25751017 | 0.00021 | 3.7849 | Dom | A | HYPERTEN_Yes | Pre-CARE |
| hCG24742 | KIAA0329 | hCV25751017 | 0.00972 | 2.5963 | Dom | A | GLUCOSE_TERTILE_3 | Pre-CARE |
| hCG24742 | KIAA0329 | hCV25751017 | 0.02797 | 1.84 | Dom | A | Smoke_Yes | Pre-CARE |
| hCG24742 | KIAA0329 | hCV25751017 | 0.03077 | 2.3483 | Dom | A | AGE_TERTILE_3 | Pre-CARE |
| hCG24742 | KIAA0329 | hCV25751017 | 0.0472 | 1.6493 | Allelic | A | ALL | Pre-CARE |
| hCG37774 | MTP | hCV25921533 | 0.02675 | 2.4759 | Dom | G | ALL | During-CARE |
| hCG37774 | MTP | hCV25921533 | 0.0264 | 3.5746 | Dom | G | Pravastatin | Pre-CARE |
| hCG37774 | MTP | hCV25921533 | 0.04684 | 3.5531 | Dom | G | GLUCOSE_TERTILE_2 | Pre-CARE |
| hCG1644073 | MARK3 | hCV25926178 | 0.01201 | 1.2939 | Allelic | G | ALL | During-CARE |
| hCG1644073 | MARK3 | hCV25926178 | 0.02801 | 1.3391 | Allelic | G | FMHX_No | During-CARE |
| hCG1644073 | MARK3 | hCV25926178 | 0.01328 | 2.0095 | Rec | G | BMI_TERTILE_2 | Pre-CARE |
| hCG1644073 | MARK3 | hCV25926178 | 0.03922 | 1.4168 | Dom | G | FMHX_No | Pre-CARE |
| hCG23227 | PTPRJ | hCV25943544 | 0.00904 | 0.3289 | Rec | G | BMI_TERTILE_2 | During-CARE |
| hCG23227 | PTPRJ | hCV25943544 | 0.00931 | 0.6927 | Allelic | G | HYPERTEN_No | During-CARE |
| hCG23227 | PTPRJ | hCV25943544 | 0.01973 | 0.5257 | Rec | G | Placebo | During-CARE |
| hCG23227 | PTPRJ | hCV25943544 | 0.02428 | 0.376 | Rec | G | GLUCOSE_TERTILE_1 | During-CARE |
| hCG23227 | PTPRJ | hCV25943544 | 0.02713 | 0.5179 | Allelic | G | Female | During-CARE |
| hCG23227 | PTPRJ | hCV25943544 | 0.03857 | 0.7211 | Rec | G | ALL | Pre-CARE |
| hCG38457 | AMPD1 | hCV25952807 | 0.00416 | 2.8107 | Dom | T | GLUCOSE_TERTILE_2 | During-CARE |
| hCG38457 | AMPD1 | hCV25952807 | 0.00395 | 1.9133 | Dom | T | ALL | Pre-CARE |
| hCG2026185 | CELL | hCV2603661 | 0.02421 | 2.5381 | Rec | T | AGE_TERTILE_1 | During-CARE |
| hCG2026185 | CELL | hCV2603661 | 0.0459 | 2.1859 | Rec | T | AGE_TERTILE_1 | Pre-CARE |
| hCG38895 | NDE1 | hCV2614880 | 0.01297 | 0.4303 | Rec | C | GLUCOSE_TERTILE_1 | During-CARE |
| hCG38895 | NDE1 | hCV2614880 | 0.00374 | 0.6298 | Rec | C | ALL | Pre-CARE |
| hCG1647381 | CCL24 | hCV2633049 | 0.01536 | 0.6129 | Dom | T | Placebo | During-CARE |
| hCG1647381 | CCL24 | hCV2633049 | 0.00475 | 0.6225 | Allelic | T | Placebo | Pre-CARE |
| hCG1789838 | ABCA1 | hCV2741051 | 0.02017 | 0.6919 | Allelic | T | Placebo | During-CARE |
| hCG1789838 | ABCA1 | hCV2741051 | 0.03646 | 0.6948 | Dom | T | Placebo | Pre-CARE |
| hCG1789838 | ABCA1 | hCV2741104 | 0.01942 | 0.5838 | Dom | T | GLUCOSE_TERTILE_3 | During-CARE |
| hCG1789838 | ABCA1 | hCV2741104 | 0.03262 | 0.6617 | Dom | T | Placebo | During-CARE |
| hCG1789838 | ABCA1 | hCV2741104 | 0.02491 | 0.7932 | Allelic | T | ALL | Pre-CARE |
| hCG1789838 | ABCA1 | hCV2741104 | 0.00028 | 0.5035 | Dom | T | Placebo | Pre-CARE |
| hCG1984906 | IL4R | hCV2769554 | 0.01624 | 0.4692 | Rec | G | GLUCOSE_TERTILE_3 | During-CARE |
| hCG1984906 | IL4R | hCV2769554 | 0.00478 | 0.6638 | Allelic | G | GLUCOSE_TERTILE_3 | Pre-CARE |
| hCG1641222 | SERPINA11 | hCV2786283 | 0.01933 | 1.9405 | Rec | T | GLUCOSE_TERTILE_3 | During-CARE |
| hCG1641222 | SERPINA11 | hCV2786283 | 0.02424 | 1.7985 | Rec | T | Pravastatin | During-CARE |
| hCG1641222 | SERPINA11 | hCV2786283 | 0.03636 | 1.8686 | Rec | T | AGE_TERTILE_3 | During-CARE |
| hCG1641222 | SERPINA11 | hCV2786283 | 0.03768 | 1.2563 | Allelic | T | Male | During-CARE |
| hCG1641222 | SERPINA11 | hCV2786283 | 0.04029 | 1.198 | Allelic | T | ALL | Pre-CARE |
| hCG401253 | COL6A2 | hCV2811372 | 0.03399 | 0.8158 | Dom | G | ALL | During-CARE |
| hCG401253 | COL6A2 | hCV2811372 | 0.02785 | 0.7828 | Rec | G | Smoke_Yes | Pre-CARE |
| hCG1646681 | TLR10 | hCV309084 | 0.03395 | 0.24 | Rec | C | ALL | During-CARE |
| hCG1646681 | TLR10 | hCV309084 | 0.00674 | 0.4407 | Dom | C | AGE_TERTILE_1 | Pre-CARE |
| hCG1646681 | TLR10 | hCV309084 | 0.00994 | 0.5165 | Dom | C | GLUCOSE_TERTILE_1 | Pre-CARE |
| hCG1981155 | FBN2 | hCV3186502 | 0.04613 | 12.0291 | Rec | G | GLUCOSE_TERTILE_1 | During-CARE |
| hCG1981155 | FBN2 | hCV3186502 | 0.00114 | 25.48 | Rec | G | GLUCOSE_TERTILE_1 | Pre-CARE |
| hCG17143 | APRG1, ITGA9 | hCV3215409 | 0.02347 | 0.4602 | Rec | G | Pravastatin | During-CARE |
| hCG17143 | APRG1, ITGA9 | hCV3215409 | 0.01325 | 0.663 | Rec | G | ALL | Pre-CARE |
| hCG19652 | MYH11 | hCV334226 | 0.04197 | 2.035 | Rec | G | ALL | During-CARE |
| hCG19652 | MYH11 | hCV334226 | 0.01034 | 10.5161 | Rec | G | Smoke_Yes | During-CARE |
| hCG19652 | MYH11 | hCV334226 | 0.01691 | 2.8301 | Rec | G | HYPERTEN_No | During-CARE |
| hCG19652 | MYH11 | hCV334226 | 0.01953 | 5.1111 | Rec | G | GLUCOSE_TERTILE_1 | During-CARE |
| hCG19652 | MYH11 | hCV334226 | 0.02531 | 2.0479 | Dom | G | Smoke_No | During-CARE |
| hCG19652 | MYH11 | hCV334226 | 0.03006 | 1.398 | Allelic | G | FMHX_No | During-CARE |
| hCG19652 | MYH11 | hCV334226 | 0.0375 | 1.4819 | Allelic | G | BMI_TERTILE_3 | During-CARE |
| hCG19652 | MYH11 | hCV334226 | 0.0044 | 2.0504 | Dom | G | AGE_TERTILE_1 | Pre-CARE |
| hCG19652 | MYH11 | hCV334226 | 0.0046 | 1.7939 | Dom | G | GLUCOSE_TERTILE_2 | Pre-CARE |
| hCG19652 | MYH11 | hCV334226 | 0.02176 | 1.4511 | Dom | G | FMHX_No | Pre-CARE |
| hCG19652 | MYH11 | hCV334226 | 0.04629 | 1.278 | Dom | G | ALL | Pre-CARE |
| hCG2002097 | PECAM1 | hCV435368 | 0.01763 | 1.2686 | Allelic | C | ALL | During-CARE |
| hCG2002097 | PECAM1 | hCV435368 | 0.00283 | 1.8054 | Rec | C | FMHX_No | During-CARE |
| hCG2002097 | PECAM1 | hCV435368 | 0.00658 | 1.5923 | Allelic | C | GLUCOSE_TERTILE_1 | During-CARE |
| hCG2002097 | PECAM1 | hCV435368 | 0.00733 | 1.4384 | Allelic | C | HYPERTEN_No | During-CARE |
| hCG2002097 | PECAM1 | hCV435368 | 0.00753 | 1.6056 | Allelic | C | BMI_TERTILE_2 | During-CARE |
| hCG2002097 | PECAM1 | hCV435368 | 0.01005 | 1.7989 | Dom | C | Placebo | During-CARE |
| hCG2002097 | PECAM1 | hCV435368 | 0.0146 | 1.7845 | Rec | C | Pravastatin | During-CARE |
| hCG2002097 | PECAM1 | hCV435368 | 0.02275 | 1.2736 | Allelic | C | Male | During-CARE |
| hCG2002097 | PECAM1 | hCV435368 | 0.00054 | 1.635 | Allelic | C | GLUCOSE_TERTILE_3 | Pre-CARE |
| hCG2002097 | PECAM1 | hCV435368 | 0.00069 | 1.6513 | Allelic | C | BMI_TERTILE_3 | Pre-CARE |
| hCG2002097 | PECAM1 | hCV435368 | 0.00074 | 2.1266 | Rec | C | AGE_TERTILE_2 | Pre-CARE |
| hCG2002097 | PECAM1 | hCV435368 | 0.00856 | 1.3235 | Allelic | C | Smoke_Yes | Pre-CARE |
| hCG2002097 | PECAM1 | hCV435368 | 0.01096 | 1.256 | Allelic | C | Male | Pre-CARE |
| hCG2002097 | PECAM1 | hCV435368 | 0.01177 | 1.3314 | Allelic | C | HYPERTEN_No | Pre-CARE |
| hCG2002097 | PECAM1 | hCV435368 | 0.01387 | 1.2353 | Allelic | C | ALL | Pre-CARE |
| hCG2002097 | PECAM1 | hCV435368 | 0.02701 | 1.3129 | Allelic | C | Placebo | Pre-CARE |
| hCG2002097 | PECAM1 | hCV435368 | 0.0286 | 1.2842 | Allelic | C | FMHX_No | Pre-CARE |
| hCG1739048 | IL22RA1 | hCV440166 | 0.00089 | 0.2805 | Dom | G | Female | During-CARE |
| hCG1739048 | IL22RA1 | hCV440166 | 0.00896 | 0.3614 | Dom | G | Female | Pre-CARE |
| hCG1730701 | MMP27 | hCV7492601 | 0.00852 | 2.2587 | Dom | A | GLUCOSE_TERTILE_1 | During-CARE |
| hCG1730701 | MMP27 | hCV7492601 | 0.03638 | 1.5708 | Dom | A | Smoke_Yes | During-CARE |
| hCG1730701 | MMP27 | hCV7492601 | 0.0278 | 1.3681 | Rec | A | ALL | Pre-CARE |
| hCG1730701 | MMP27 | hCV7492601 | 0.01707 | 1.5277 | Rec | A | Smoke_Yes | Pre-CARE |
| hCG37044 | PLAB | hCV7494817 | 0.00789 | 2.9652 | Rec | T | GLUCOSE_TERTILE_2 | During-CARE |
| hCG37044 | PLAB | hCV7494817 | 0.02601 | 2.5403 | Rec | T | FMHX_Yes | During-CARE |
| hCG37044 | PLAB | hCV7494817 | 0.04434 | 1.2755 | Dom | T | ALL | Pre-CARE |
| hCG37044 | PLAB | hCV7494817 | 0.02834 | 1.4983 | Dom | T | FMHX_Yes | Pre-CARE |
| hCG2023558 | TF | hCV7505275 | 0.03439 | 1.5832 | Dom | T | Pravastatin | During-CARE |
| hCG2023558 | TF | hCV7505275 | 0.04592 | 1.2507 | Allelic | T | ALL | Pre-CARE |
| hCG43681 | LTA | hCV7514870 | 0.03133 | 1.3568 | Dom | C | ALL | During-CARE |
| hCG43681 | LTA | hCV7514870 | 0.00579 | 1.4664 | Allelic | C | Placebo | During-CARE |
| hCG43681 | LTA | hCV7514870 | 0.01694 | 1.5739 | Dom | C | Smoke_Yes | During-CARE |
| hCG43681 | LTA | hCV7514870 | 0.01804 | 1.438 | Dom | C | Male | During-CARE |
| hCG43681 | LTA | hCV7514870 | 0.02986 | 1.4939 | Dom | C | FMHX_No | During-CARE |
| hCG43681 | LTA | hCV7514870 | 0.03305 | 1.5173 | Dom | C | HYPERTEN_No | During-CARE |
| hCG43681 | LTA | hCV7514870 | 0.03717 | 1.6553 | Dom | C | AGE_TERTILE_3 | During-CARE |
| hCG43681 | LTA | hCV7514870 | 0.00411 | 2.2277 | Rec | C | BMI_TERTILE_2 | Pre-CARE |
| hCG43681 | LTA | hCV7514870 | 0.01611 | 1.8673 | Rec | C | HYPERTEN_Yes | Pre-CARE |
| hCG43681 | LTA | hCV7514870 | 0.03341 | 1.5625 | Rec | C | Smoke_Yes | Pre-CARE |
| hCG43681 | LTA | hCV7514870 | 0.03346 | 1.7106 | Rec | C | Placebo | Pre-CARE |
| hCG43681 | LTA | hCV7514870 | 0.04831 | 1.4136 | Rec | C | ALL | Pre-CARE |
| hCG42697 | SLC9A3R2 | hCV7577801 | 0.03675 | 0.7665 | Allelic | T | ALL | During-CARE |
| hCG42697 | SLC9A3R2 | hCV7577801 | 0.03908 | 0.6252 | Allelic | T | GLUCOSE_TERTILE_1 | During-CARE |
| hCG42697 | SLC9A3R2 | hCV7577801 | 0.03065 | 0.5953 | Dom | T | GLUCOSE_TERTILE_1 | Pre-CARE |
| hCG38107 | HNF4A, FLJ39654 | hCV7591528 | 0.04368 | 1.7474 | Dom | A | ALL | During-CARE |
| hCG38107 | HNF4A, FLJ39654 | hCV7591528 | 0.02884 | 2.0903 | Dom | A | Placebo | During-CARE |
| hCG38107 | HNF4A, FLJ39654 | hCV7591528 | 0.04271 | 1.9515 | Dom | A | Placebo | Pre-CARE |
| hCG1990887 | CTSB | hCV8339788 | 0.01271 | 1.5833 | Rec | G | ALL | During-CARE |
| hCG1990887 | CTSB | hCV8339788 | 0.00398 | 2.4373 | Rec | G | AGE_TERTILE_1 | Pre-CARE |
| hCG27217 | ANPEP | hCV8722613 | 0.04591 | 1.4558 | Dom | T | Smoke_Yes | During-CARE |
| hCG27217 | ANPEP | hCV8722613 | 0.03941 | 1.62 | Rec | T | Smoke_Yes | Pre-CARE |
| hCG1733963 | IL1RN | hCV8737990 | 0.03372 | 2.3917 | Rec | T | BMI_TERTILE_1 | During-CARE |
| hCG1733963 | IL1RN | hCV8737990 | 0.02275 | 1.4433 | Allelic | T | BMI_TERTILE_1 | Pre-CARE |
| hCG36934 | ADRB2 | hCV8950503 | 0.03779 | 12.9645 | Rec | T | ALL | During-CARE |
| hCG36934 | ADRB2 | hCV8950503 | 0.00397 | 12.8727 | Dom | T | Smoke_Yes | Pre-CARE |
| hCG36934 | ADRB2 | hCV8950503 | 0.00552 | 5.0704 | Dom | T | AGE_TERTILE_1 | Pre-CARE |
| hCG36934 | ADRB2 | hCV8950503 | 0.03483 | 3.4016 | Dom | T | GLUCOSE_TERTILE_2 | Pre-CARE |
| hCG32995 | IMPG1 | hCV9055799 | 0.02635 | 0.7954 | Allelic | G | ALL | During-CARE |
| hCG32995 | IMPG1 | hCV9055799 | 0.00308 | 0.2333 | Rec | G | BMI_TERTILE_2 | During-CARE |
| hCG32995 | IMPG1 | hCV9055799 | 0.00157 | 0.2946 | Dom | G | Female | During-CARE |
| hCG32995 | IMPG1 | hCV9055799 | 0.00034 | 0.5754 | Allelic | G | BMI_TERTILE_2 | Pre-CARE |
| hCG32995 | IMPG1 | hCV9055799 | 0.00222 | 0.6556 | Allelic | G | FMHX_Yes | Pre-CARE |
| hCG32995 | IMPG1 | hCV9055799 | 0.00682 | 0.4686 | Dom | G | Smoke_No | Pre-CARE |
| hCG32995 | IMPG1 | hCV9055799 | 0.02136 | 0.481 | Allelic | G | Female | Pre-CARE |
| hCG1642498 | FCGR2A | hCV9077561 | 0.03998 | 1.5938 | Dom | A | Placebo | During-CARE |
| hCG1642498 | FCGR2A | hCV9077561 | 0.03628 | 1.4929 | Rec | A | Placebo | Pre-CARE |
| hCG15321 | CCR5 | hCV9698595 | 0.03437 | 8.6429 | Rec | T | ALL | During-CARE |
| hCG15321 | CCR5 | hCV9698595 | 0.00604 | 19.007 | Rec | T | Placebo | During-CARE |
| hCG15321 | CCR5 | hCV9698595 | 0.00625 | 18.9196 | Rec | T | GLUCOSE_TERTILE_3 | During-CARE |
| hCG15321 | CCR5 | hCV9698595 | 0.01204 | 3.4854 | Dom | T | GLUCOSE_TERTILE_2 | During-CARE |
| hCG15321 | CCR5 | hCV9698595 | 0.02265 | 15.6809 | Rec | T | BMI_TERTILE_1 | During-CARE |
| hCG15321 | CCR5 | hCV9698595 | 0.02885 | 14.3755 | Rec | T | HYPERTEN_No | During-CARE |
| hCG15321 | CCR5 | hCV9698595 | 0.03394 | 8.7067 | Rec | T | FMHX_No | During-CARE |
| hCG15321 | CCR5 | hCV9698595 | 0.03726 | 8.4384 | Rec | T | Male | During-CARE |
| hCG15321 | CCR5 | hCV9698595 | 0.04014 | 12.7006 | Rec | T | BMI_TERTILE_2 | During-CARE |
| hCG15321 | CCR5 | hCV9698595 | 0.04101 | 12.5866 | Rec | T | AGE_TERTILE_3 | During-CARE |
| hCG15321 | CCR5 | hCV9698595 | 0.04975 | 11.6057 | Rec | T | AGE_TERTILE_2 | During-CARE |
| hCG15321 | CCR5 | hCV9698595 | 0.0248 | 2.6025 | Allelic | T | FMHX_Yes | Pre-CARE |
| hCG15321 | CCR5 | hCV9698595 | 0.02763 | 14.6376 | Rec | T | AGE_TERTILE_1 | Pre-CARE |
| hCG15321 | CCR5 | hCV9698595 | 0.04962 | 1.6152 | Allelic | T | ALL | Pre-CARE |
| hCG27217 | ANPEP | hCV1381400 | 0.01581 | 0.5654 | Allelic | T | Smoke_No | During-CARE |
| hCG27217 | ANPEP | hCV1381400 | 0.04487 | 0.4911 | Rec | T | Smoke_No | Pre-CARE |
| hCG27878 | F7 | hCV783138 | 0.04297 | 2.1939 | Rec | G | BMI_TERTILE_1 | During-CARE |
| hCG27878 | F7 | hCV783138 | 0.01545 | 2.0614 | Rec | G | BMI_TERTILE_1 | Pre-CARE |

The application's sequence listing, which the Patent Office published only in electronic form, follows.

SEQUENCE LISTING (139 sequences)

SEQ ID NO: 1 - DNA, 10247 bp, Homo sapiens
gtaattgcgagcgagagtgagtggggccgggacccgcagagccgagccgacccttctctcccgggctgcggcagggcagggcggggagctccgcgcaccaacagagccggttctcagggcgctttgctccttgttttttccccggttctgttttctccccttctccggaaggcttgtcaaggggtaggagaaagagacgcaaacacaaaagtggaaaacagtgtcagctgctgctggaagtggcctggcctctatttatcttcctgatcctgatctctgttcggctgagctacccaccctatgaacaacatgaatgccattttccaaataaagccatgccctctgcaggaacacttccttgggttcaggggattatctgtaatgccaacaacccctgtttccgttacccgactcctggggaggctcccggagttgttggaaactttaacaaatccattgtggctcgcctgttctcagatgctcggaggcttcttttatacagccagaaagacaccagcatgaaggacatgcgcaaagttctgagaacattacagcagatcaagaaatccagctcaaacttgaagcttcaagatttcctggtggacaatgaaaccttctctgggttcctgtatcacaacctctctctcccaaagtctactgtggacaagatgctgagggctgatgtcattctccacaaggtatttttgcaaggctaccagttacatttgacaagtctgtgcaatggatcaaaatcagaagagatgattcaacttggtgaccaagaagtttctgagctttgtggcctaccaagggagaaactggctgcagcagagcgagtacttcgttccaacatggacatcctgaagccaatcctgagaacactaaactctacatctcccttcccgagcaaggagctggctgaagccacaaaaacattgctgcatagtcttgggactctggcccaggagctgttcagcatgagaagctggagtgacatgcgacaggaggtgatgtttctgaccaatgtgaacagctccagctcctccacccaaatctaccaggctgtgtctcgtattgtctgcgggcatcccgagggaggggggctgaagatcaagtctctcaactggtatgaggacaacaactacaaagccctctttggaggcaatggcactgaggaagatgctgaaaccttctatgacaactctacaactccttactgcaatgatttgatgaagaatttggagtctagtcctctttcccgcattatctggaaagctctgaagccgctgctcgttgggaagatcctgtatacacctgacactccagccacaaggcaggtcatggctgaggtgaacaagaccttccaggaactggctgtgttccatgatctggaaggcatgtgggaggaactcagccccaagatctggaccttcatggagaacagccaagaaatggaccttgtccggatgctgttggacagcagggacaatgaccacttttgggaacagcagttggatggcttagattggacagcccaagacatcgtggcgtttttggccaagcacccagaggatgtccagtccagtaatggttctgtgtacacctggagagaagctttcaacgagactaaccaggcaatccggaccatatctcgcttcatggagtgtgtcaacctgaacaagctagaacccatagcaacagaagtctggctcatcaacaagtccatggagctgctggatgagaggaagttctgggctggtattgtgttcactggaattactccaggcagcattgagctgccccatcatgtcaagtacaagatccgaatggacattgacaatgtggagaggacaaataaaatcaaggatgggtactgggaccctggtcctcgagctgacccctttgaggacatgcggtacgtctgggggggcttcgcctacttgcaggatgtggtggagcaggcaatcatcagggtgctgacgggcaccgagaagaaaactggtgtctatatgcaacagatgccctatccctgttacgttgatgacatctttctgcgggtgatgagccggtcaatgcccctcttcatgacgctggcctggatttactcagtggctgtgatcatcaagggcatcgtgtatgagaaggaggcacggctgaaagagaccatgcggatcatgggcctggacaacagcatcctctggtttagctggttcattagtagcctcattcctcttcttgtgagcgctggcctgctagtggtcatcctgaagttaggaaacctgctgccctacagtgatcccagcgtggtgtttgtcttcctgtccgtgtttgctgtggtgacaatcctgcagtgcttcctgattagcacactcttctccagagccaacctggcagcagcctgtgggggcatcatctacttcacgctgtacctgccctacgtcctgtgtgtggcatggcaggactacgtgggcttcacactcaagatcttcgctagcctgctgtctcctgtggcttttgggtttggctgtgagtactttgccctttttgaggagcagggcattggagtgcagtgggacaacctgtttgagagtcctgtggaggaagatggcttcaatctcaccacttcggtctccatgatgctgtttgacaccttcctctatggggtgatgacctggtacattgaggctgtctttccaggccagtacggaattcccaggccctggtattttccttgcaccaagtcctactggtttggcgaggaaagtgatgagaagagccaccctggttccaaccagaagagaatatcagaaatctgcatggaggaggaacccacccacttgaagctgggcgtgtccattcagaacctggtaaaagtctaccgagatgggatgaaggtggctgtcgatggcctggcactgaatttttatgagggccagatcacctccttcctgggccacaatggagcggggaagacgaccaccatgtcaatcctgaccgggttgttccccccgacctcgggcaccgcctacatcctgggaaaagacattcgctctgagatgagcaccatccggcagaacctgggggtctgtccccagcataacgtgctgtttgacatgctgactgtcgaagaacacatctggttctatgcccgcttgaaagggctctctgagaagcacgtgaaggcggagatggagcagatggccctggatgttggtttgccatcaagcaagctgaaaagcaaaacaagccagctgtcaggtggaatgcagagaaagctatctgtggccttggcctttgtcgggggatctaaggttgtcattctggatgaacccacagctggtgtggacccttactcccgcaggggaatatgggagctgctgctgaaataccgacaaggccgcaccattattctctctacacaccacatggatgaagcggacgtcctgggggacaggattgccatcatctcccatgggaagctgtgctgtgtgggctcctccctgtttctgaagaaccagctgggaacaggctactacctgaccttggtcaagaaagatgtggaatcctccctcagttcctgcagaaacagtagtagcactgtgtcatacctgaaaaaggaggacagtgtttctcagagcagttctgatgctggcctgggcagcgaccatgagagtgacacgctgaccatcgatgtctctgctatctccaacctcatcaggaagcatgtgtctgaagcccggctggtggaagacatagggcatgagctgacctatgtgctgccatatgaagctgctaaggagggagcctttgtggaactctttcatgagattgatgaccggctctcagacctgggcatttctagttatggcatctcagagacgaccctggaagaaatattcctcaaggtggccgaagagagtggggtggatgctgagacctcagatggtaccttgccagcaagacgaaacaggcgggccttcggggacaagcagagctgtcttcgcccgttcactgaagatgatgctgctgatccaaatgattctgacatagacccagaatccagagagacagacttgctcagtgggatggatggcaaagggtcctaccaggtgaaaggctggaaacttacacagcaacagtttgtggcccttttgtggaagagactgctaattgccagacggagtcggaaaggattttttgctcagattgtcttgccagctgtgtttgtctgcattgcccttgtgttcagcctgatcgtgccaccctttggcaagtaccccagcctggaacttcagccctggatgtacaacgaacagtacacatttgtcagcaatgatgctcctgaggacacgggaaccctggaactcttaaacgccctcaccaaagaccctggcttcgggacccgctgtatggaaggaaacccaatcccagacacgccctgccaggcaggggaggaagagtggaccactgccccagttccccagaccatcatggacctcttccagaatgggaactggacaatgcagaacccttcacctgcatgccagtgtagcagcgacaaaatcaagaagatgctgcctgtgtgtcccccaggggcaggggggctgcctcctccacaaagaaaacaaaacactgcagatatccttcaggacctgacaggaagaaacatttcggattatctggtgaagacgtatgtgcagatcatagccaaaagcttaaagaacaagatctgggtgaatgagtttaggtatggcggcttttccctgggtgtcagtaatactcaagcacttcctccgagtcaagaagttaatgatgccatcaaacaaatgaagaaacacctaaagctggccaaggacagttctgcagatcgatttctcaacagcttgggaagatttatgacaggactggacaccagaaataatgtcaaggtgtggttcaataacaagggctggcatgcaatcagctctttcctgaatgtcatcaacaatgccattctccgggccaacctgcaaaagggagagaaccctagccattatggaattactgctttcaatcatcccctgaatctcaccaagcagcagctctcagaggtggctctgatgaccacatcagtggatgtccttgtgtccatctgtgtcatctttgcaatgtccttcgtcccagccagctttgtcgtattcctgatccaggagcgggtcagcaaagcaaaacacctgcagttcatcagtggagtgaagcctgtcatctactggctctctaattttgtctgggatatgtgcaattacgttgtccctgccacactggtcattatcatcttcatctgcttccagcagaagtcctatgtgtcctccaccaatctgcctgtgctagcccttctacttttgctgtatgggtggtcaatcacacctctcatgtacccagcctcctttgtgttcaagatccccagcacagcctatgtggtgctcaccagcgtgaacctcttcattggcattaatggcagcgtggccacctttgtgctggagctgttcaccgacaataagctgaataatatcaatgatatcctgaagtccgtgttcttgatcttcccacatttttgcctgggacgagggctcatcgacatggtgaaaaaccaggcaatggctgatgccctggaaaggtttggggagaatcgctttgtgtcaccattatcttgggacttggtgggacgaaacctcttcgccatggccgtggaaggggtggtgttcttcctcattactgttctgatccagtacagattcttcatcaggcccagacctgtaaatgcaaagctatctcctctgaatgatgaagatgaagatgtgaggcgggaaagacagagaattcttgatggtggaggccagaatgacatcttagaaatcaaggagttgacgaagatatatagaaggaagcggaagcctgctgttgacaggatttgcgtgggcattcctcctggtgagtgctttgggctcctgggagttaatggggctggaaaatcatcaactttcaagatgttaacaggagataccactgttaccagaggagatgctttccttaacaaaaatagtatcttatcaaacatccatgaagtacatcagaacatgggctactgccctcagtttgatgccatcacagagctgttgactgggagagaacacgtggagttctttgcccttttgagaggagtcccagagaaagaagttggcaaggttggtgagtgggcgattcggaaactgggcctcgtgaagtatggagaaaaatatgctggtaactatagtggaggcaacaaacgcaagctctctacagccatggctttgatcggcgggcctcctgtggtgtttctggatgaacccaccacaggcatggatcccaaagcccggcggttcttgtggaattgtgccctaagtgttgtcaaggaggggagatcagtagtgcttacatctcatagtatggaagaatgtgaagctctttgcactaggatggcaatcatggtcaatggaaggttcaggtgccttggcagtgtccagcatctaaaaaataggtttggagatggttatacaatagttgtacgaatagcagggtccaacccggacctgaagcctgtccaggatttctttggacttgcatttcctggaagtgttctaaaagagaaacaccggaacatgctacaataccagcttccatcttcattatcttctctggccaggatattcagcatcctctcccagagcaaaaagcgactccacatagaagactactctgtttctcagacaacacttgaccaagtatttgtgaactttgccaaggaccaaagtgatgatgaccacttaaaagacctctcattacacaaaaaccagacagtagtggacgttgcagttctcacatcttttctacaggatgagaaagtgaaagaaagctatgtatgaagaatcctgttcatacggggtggctgaaagtaaagaggaactagactttcctttgcaccatgtgaagtgttgtggagaaaagagccagaagttgatgtgggaagaagtaaactggatactgtactgatactattcaatgcaatgcaattcaatgcaatgaaaacaaaattccattacaggggcagtgcctttgtagcctatgtcttgtatggctctcaagtgaaagacttgaatttagttttttacctatacctatgtgaaactctattatggaacccaatggacatatgggtttgaactcacacttttttttttttttttgttcctgtgtattctcattggggttgcaacaataattcatcaagtaatcatggccagcgattattgatcaaaatcaaaaggtaatgcacatcctcattcactaagccatgccatgcccaggagactggtttcccggtgacacatccattgctggcaatgagtgtgccagagttattagtgccaagtttttcagaaagtttgaagcaccatggtgtgtcatgctcacttttgtgaaagctgctctgctcagagtctatcaacattgaatatcagttgacagaatggtgccatgcgtggctaacatcctgctttgattccctctgataagctgttctggtggcagtaacatgcaacaaaaatgtgggtgtctccaggcacgggaaacttggttccattgttatattgtcctatgcttcgagccatgggtctacagggtcatccttatgagactcttaaatatacttagatcctggtaagaggcaaagaatcaacagccaaactgctggggctgcaagctgctgaagccagggcatgggattaaagagattgtgcgttcaaacctagggaagcctgtgcccatttgtcctgactgtctgctaacatggtacactgcatctcaagatgtttatctgacacaagtgtattatttctggctttttgaattaatctagaaaatgaaaagatggagttgtattttgacaaaaatgtttgtactttttaatgttatttggaattttaagttctatcagtgacttctgaatccttagaatggcctctttgtagaaccctgtggtatagaggagtatggccactgccccactatttttattttcttatgtaagtttgcatatcagtcatgactagtgcctagaaagcaatgtgatggtcaggatctcatgacattatatttgagtttctttcagatcatttaggatactcttaatctcacttcatcaatcaaatattttttgagtgtatgctgtagctgaaagagtatgtacgtacgtataagactagagagatattaagtctcagtacacttcctgtgccatgttattcagctcactggtttacaaatataggttgtcttgtggttgtaggagcccactgtaacaatactgggcagcctttttttttttttttttaattgcaacaatgcaaaagccaagaaagtataagggtcacaagtctaaacaatgaattcttcaacagggaaaacagctagcttgaaaacttgctgaaaaacacaacttgtgtttatggcatttagtaccttcaaataattggctttgcagatattggataccccattaaatctgacagtctcaaatttttcatctcttcaatcactagtcaagaaaaatataaaaacaacaaatacttccatatggagcatttttcagagttttctaacccagtcttatttttctagtcagtaaacatttgtaaaaatactgtttcactaatacttactgttaactgtcttgagagaaaagaaaaatatgagagaactattgtttggggaagttcaagtgatctttcaatatcattactaacttcttccactttttccagaatttgaatattaacgctaaaggtgtaagacttcagatttcaaattaatctttctatattttttaaatttacagaatattatataacccactgctgaaaaagaaaaaaatgattgttttagaagttaaagtcaatattgattttaaatataagtaatgaaggcatatttccaataactagtgatatggcatcgttgcattttacagtatcttcaaaaatacagaatttatagaataatttctcctcatttaatatttttcaaaatcaaagttatggtttcctcattttactaaaatcgtattctaattcttcattatagtaaatctatgagcaactccttacttcggttcctctgatttcaaggccatattttaaaaaatcaaaaggcactgtgaactattttgaagaaaacacaacattttaatacagattgaaaggacctcttctgaagctagaaacaatctatagttatacatcttcattaatactgtgttaccttttaaaatagtaattttttacattttcctgtgtaaacctaattgtggtagaaatttttaccaactctatactcaatcaagcaaaatttctgtatattccctgtggaatgtacctatgtgagtttcagaaattctcaaaatacgtgttcaaaaatttctgcttttgcatctttgggacacctcagaaaacttattaacaactgtgaatatgagaaatacagaagaaaataataagccctctatacataaatgcccagcacaattcattgttaaaaaacaaccaaacctcacactactgtatttcattatctgtactgaaagcaaatgctttgtgactattaaatgttgcacatcattcattcactgtatagtaatcattgactaaagccatttgtctgtgttttcttcttgtggttgtatatatcaggtaaaatattttccaaagagccatgtgtcatgtaatactgaaccactttgatattgagacattaatttgtacccttgttattatctactagtaataatgtaatactgtagaaatattgctctaattcttttcaaaattgttgcatcccccttagaatgtttctatttccataaggatttaggtatgctattatcccttcttataccctaagatgaagctgtttttgtgctctttgttcatcattggccctcattccaagcactttacgctgtctgtaatgggatctatttttgcactggaatatctgagaattgcaaaactagacaaaagtttcacaacagatttctaagttaaatcattttcattaaaaggaaaaaagaaaaaaaattttgtatgtcaataactttatatgaagtattaaaatgcatatttctatgttgtaatataatgagtcacaaaataaagctgtgacagttctgttggtct

SEQ ID NO: 2 - DNA, 10405 bp, Homo sapiens
gtaattgcgagcgagagtgagtggggccgggacccgcagagccgagccgacccttctctcccgggctgcggcagggcagggcggggagctccgcgcaccaacagagccggttctcagggcgctttgctccttgttttttccccggttctgttttctccccttctccggaaggcttgtcaaggggtaggagaaagagacgcaaacacaaaagtggaaaacagttaatgaccagccacggcgtccctgctgtgagctctggccgctgccttccagggctcccgagccacacgctgggggtgctggctgagggaacatggcttgttggcctcagctgaggttgctgctgtggaagaacctcactttcagaagaagacaaacatgtcagctgctgctggaagtggcctggcctctatttatcttcctgatcctgatctctgttcggctgagctacccaccctatgaacaacatgaatgccattttccaaataaagccatgccctctgcaggaacacttccttgggttcaggggattatctgtaatgccaacaacccctgtttccgttacccgactcctggggaggctcccggagttgttggaaactttaacaaatccattgtggctcgcctgttctcagatgctcggaggcttcttttatacagccagaaagacaccagcatgaaggacatgcgcaaagttctgagaacattacagcagatcaagaaatccagctcaaacttgaagcttcaagatttcctggtggacaatgaaaccttctctgggttcctgtatcacaacctctctctcccaaagtctactgtggacaagatgctgagggctgatgtcattctccacaaggtatttttgcaaggctaccagttacatttgacaagtctgtgcaatggatcaaaatcagaagagatgattcaacttggtgaccaagaagtttctgagctttgtggcctaccaagggagaaactggctgcagcagagcgagtacttcgttccaacatggacatcctgaagccaatcctgagaacactaaactctacatctcccttcccgagcaaggagctggctgaagccacaaaaacattgctgcatagtcttgggactctggcccaggagctgttcagcatgagaagctggagtgacatgcgacaggaggtgatgtttctgaccaatgtgaacagctccagctcctccacccaaatctaccaggctgtgtctcgtattgtctgcgggcatcccgagggaggggggctgaagatcaagtctctcaactggtatgaggacaacaactacaaagccctctttggaggcaatggcactgaggaagatgctgaaaccttctatgacaactctacaactccttactgcaatgatttgatgaagaatttggagtctagtcctctttcccgcattatctggaaagctctgaagccgctgctcgttgggaagatcctgtatacacctgacactccagccacaaggcaggtcatggctgaggtgaacaagaccttccaggaactggctgtgttccatgatctggaaggcatgtgggaggaactcagccccaagatctggaccttcatggagaacagccaagaaatggaccttgtccggatgctgttggacagcagggacaatgaccacttttgggaacagcagttggatggcttagattggacagcccaagacatcgtggcgtttttggccaagcacccagaggatgtccagtccagtaatggttctgtgtacacctggagagaagctttcaacgagactaaccaggcaatccggaccatatctcgcttcatggagtgtgtcaacctgaacaagctagaacccatagcaacagaagtctggctcatcaacaagtccatggagctgctggatgagaggaagttctgggctggtattgtgttcactggaattactccaggcagcattgagctgccccatcatgtcaagtacaagatccgaatggacattgacaatgtggagaggacaaataaaatcaaggatgggtactgggaccctggtcctcgagctgacccctttgaggacatgcggtacgtctgggggggcttcgcctacttgcaggatgtggtggagcaggcaatcatcagggtgctgacgggcaccgagaagaaaactggtgtctatatgcaacagatgccctatccctgttacgttgatgacatctttctgcgggtgatgagccggtcaatgcccctcttcatgacgctggcctggatttactcagtggctgtgatcatcaagggcatcgtgtatgagaaggaggcacggctgaaagagaccatgcggatcatgggcctggacaacagcatcctctggtttagctggttcattagtagcctcattcctcttcttgtgagcgctggcctgctagtggtcatcctgaagttaggaaacctgctgccctacagtgatcccagcgtggtgtttgtcttcctgtccgtgtttgctgtggtgacaatcctgcagtgcttcctgattagcacactcttctccagagccaacctggcagcagcctgtgggggcatcatctacttcacgctgtacctgccctacgtcctgtgtgtggcatggcaggactacgtgggcttcacactcaagatcttcgctagcctgctgtctcctgtggcttttgggtttggctgtgagtactttgccctttttgaggagcagggcattggagtgcagtgggacaacctgtttgagagtcctgtggaggaagatggcttcaatctcaccacttcggtctccatgatgctgtttgacaccttcctctatggggtgatgacctggtacattgaggctgtctttccaggccagtacggaattcccaggccctggtattttccttgcaccaagtcctactggtttggcgaggaaagtgatgagaagagccaccctggttccaaccagaagagaatatcagaaatctgcatggaggaggaacccacccacttgaagctgggcgtgtccattcagaacctggtaaaagtctaccgagatgggatgaaggtggctgtcgatggcctggcactgaatttttatgagggccagatcacctccttcctgggccacaatggagcggggaagacgaccaccatgtcaatcctgaccgggttgttccccccgacctcgggcaccgcctacatcctgggaaaagacattcgctctgagatgagcaccatccggcagaacctgggggtctgtccccagcataacgtgctgtttgacatgctgactgtcgaagaacacatctggttctatgcccgcttgaaagggctctctgagaagcacgtgaaggcggagatggagcagatggccctggatgttggtttgccatcaagcaagctgaaaagcaaaacaagccagctgtcaggtggaatgcagagaaagctatctgtggccttggcctttgtcgggggatctaaggttgtcattctggatgaacccacagctggtgtggacccttactcccgcaggggaatatgggagctgctgctgaaataccgacaaggccgcaccattattctctctacacaccacatggatgaagcggacgtcctgggggacaggattgccatcatctcccatgggaagctgtgctgtgtgggctcctccctgtttctgaagaaccagctgggaacaggctactacctgaccttggtcaagaaagatgtggaatcctccctcagttcctgcagaaacagtagtagcactgtgtcatacctgaaaaaggaggacagtgtttctcagagcagttctgatgctggcctgggcagcgaccatgagagtgacacgctgaccatcgatgtctctgctatctccaacctcatcaggaagcatgtgtctgaagcccggctggtggaagacatagggcatgagctgacctatgtgctgccatatgaagctgctaaggagggagcctttgtggaactctttcatgagattgatgaccggctctcagacctgggcatttctagttatggcatctcagagacgaccctggaagaaatattcctcaaggtggccgaagagagtggggtggatgctgagacctcagatggtaccttgccagcaagacgaaacaggcgggccttcggggacaagcagagctgtcttcgcccgttcactgaagatgatgctgctgatccaaatgattctgacatagacccagaatccagagagacagacttgctcagtgggatggatggcaaagggtcctaccaggtgaaaggctggaaacttacacagcaacagtttgtggcccttttgtggaagagactgctaattgccagacggagtcggaaaggattttttgctcagattgtcttgccagctgtgtttgtctgcattgcccttgtgttcagcctgatcgtgccaccctttggcaagtaccccagcctggaacttcagccctggatgtacaacgaacagtacacatttgtcagcaatgatgctcctgaggacacgggaaccctggaactcttaaacgccctcaccaaagaccctggcttcgggacccgctgtatggaaggaaacccaatcccagacacgccctgccaggcaggggaggaagagtggaccactgccccagttccccagaccatcatggacctcttccagaatgggaactggacaatgcagaacccttcacctgcatgccagtgtagcagcgacaaaatcaagaagatgctgcctgtgtgtcccccaggggcaggggggctgcctcctccacaaagaaaacaaaacactgcagatatccttcaggacctgacaggaagaaacatttcggattatctggtgaagacgtatgtgcagatcatagccaaaagcttaaagaacaagatctgggtgaatgagtttaggtatggcggcttttccctgggtgtcagtaatactcaagcacttcctccgagtcaagaagttaatgatgccatcaaacaaatgaagaaacacctaaagctggccaaggacagttctgcagatcgatttctcaacagcttgggaagatttatgacaggactggacaccagaaataatgtcaaggtgtggttcaataacaagggctggcatgcaatcagctctttcctgaatgtcatcaacaatgccattctccgggccaacctgcaaaagggagagaaccctagccattatggaattactgctttcaatcatcccctgaatctcaccaagcagcagctctcagaggtggctctgatgaccacatcagtggatgtccttgtgtccatctgtgtcatctttgcaatgtccttcgtcccagccagctttgtcgtattcctgatccaggagcgggtcagcaaagcaaaacacctgcagttcatcagtggagtgaagcctgtcatctactggctctctaattttgtctgggatatgtgcaattacgttgtccctgccacactggtcattatcatcttcatctgcttccagcagaagtcctatgtgtcctccaccaatctgcctgtgctagcccttctacttttgctgtatgggtggtcaatcacacctctcatgtacccagcctcctttgtgttcaagatccccagcacagcctatgtggtgctcaccagcgtgaacctcttcattggcattaatggcagcgtggccacctttgtgctggagctgttcaccgacaataagctgaataatatcaatgatatcctgaagtccgtgttcttgatcttcccacatttttgcctgggacgagggctcatcgacatggtgaaaaaccaggcaatggctgatgccctggaaaggtttggggagaatcgctttgtgtcaccattatcttgggacttggtgggacgaaacctcttcgccatggccgtggaaggggtggtgttcttcctcattactgttctgatccagtacagattcttcatcaggcccagacctgtaaatgcaaagctatctcctctgaatgatgaagatgaagatgtgaggcgggaaagacagagaattcttgatggtggaggccagaatgacatcttagaaatcaaggagttgacgaagatatatagaaggaagcggaagcctgctgttgacaggatttgcgtgggcattcctcctggtgagtgctttgggctcctgggagttaatggggctggaaaatcatcaactttcaagatgttaacaggagataccactgttaccagaggagatgctttccttaacaaaaatagtatcttatcaaacatccatgaagtacatcagaacatgggctactgccctcagtttgatgccatcacagagctgttgactgggagagaacacgtggagttctttgcccttttgagaggagtcccagagaaagaagttggcaaggttggtgagtgggcgattcggaaactgggcctcgtgaagtatggagaaaaatatgctggtaactatagtggaggcaacaaacgcaagctctctacagccatggctttgatcggcgggcctcctgtggtgtttctggatgaacccaccacaggcatggatcccaaagcccggcggttcttgtggaattgtgccctaagtgttgtcaaggaggggagatcagtagtgcttacatctcatagtatggaagaatgtgaagctctttgcactaggatggcaatcatggtcaatggaaggttcaggtgccttggcagtgtccagcatctaaaaaataggtttggagatggttatacaatagttgtacgaatagcagggtccaacccggacctgaagcctgtccaggatttctttggacttgcatttcctggaagtgttctaaaagagaaacaccggaacatgctacaataccagcttccatcttcattatcttctctggccaggatattcagcatcctctcccagagcaaaaagcgactccacatagaagactactctgtttctcagacaacacttgaccaagtatttgtgaactttgccaaggaccaaagtgatgatgaccacttaaaagacctctcattacacaaaaaccagacagtagtggacgttgcagttctcacatcttttctacaggatgagaaagtgaaagaaagctatgtatgaagaatcctgttcatacggggtggctgaaagtaaagaggaactagactttcctttgcaccatgtgaagtgttgtggagaaaagagccagaagttgatgtgggaagaagtaaactggatactgtactgatactattcaatgcaatgcaattcaatgcaatgaaaacaaaattccattacaggggcagtgcctttgtagcctatgtcttgtatggctctcaagtgaaagacttgaatttagttttttacctatacctatgtgaaactctattatggaacccaatggacatatgggtttgaactcacacttttttttttttttttgttcctgtgtattctcattggggttgcaacaataattcatcaagtaatcatggccagcgattattgatcaaaatcaaaaggtaatgcacatcctcattcactaagccatgccatgcccaggagactggtttcccggtgacacatccattgctggcaatgagtgtgccagagttattagtgccaagtttttcagaaagtttgaagcaccatggtgtgtcatgctcacttttgtgaaagctgctctgctcagagtctatcaacattgaatatcagttgacagaatggtgccatgcgtggctaacatcctgctttgattccctctgataagctgttctggtggcagtaacatgcaacaaaaatgtgggtgtctccaggcacgggaaacttggttccattgttatattgtcctatgcttcgagccatgggtctacagggtcatccttatgagactcttaaatatacttagatcctggtaagaggcaaagaatcaacagccaaactgctggggctgcaagctgctgaagccagggcatgggattaaagagattgtgcgttcaaacctagggaagcctgtgcccatttgtcctgactgtctgctaacatggtacactgcatctcaagatgtttatctgacacaagtgtattatttctggctttttgaattaatctagaaaatgaaaagatggagttgtattttgacaaaaatgtttgtactttttaatgttatttggaattttaagttctatcagtgacttctgaatccttagaatggcctctttgtagaaccctgtggtatagaggagtatggccactgccccactatttttattttcttatgtaagtttgcatatcagtcatgactagtgcctagaaagcaatgtgatggtcaggatctcatgacattatatttgagtttctttcagatcatttaggatactcttaatctcacttcatcaatcaaatattttttgagtgtatgctgtagctgaaagagtatgtacgtacgtataagactagagagatattaagtctcagtacacttcctgtgccatgttattcagctcactggtttacaaatataggttgtcttgtggttgtaggagcccactgtaacaatactgggcagcctttttttttttttttttaattgcaacaatgcaaaagccaagaaagtataagggtcacaagtctaaacaatgaattcttcaacagggaaaacagctagcttgaaaacttgctgaaaaacacaacttgtgtttatggcatttagtaccttcaaataattggctttgcagatattggataccccattaaatctgacagtctcaaatttttcatctcttcaatcactagtcaagaaaaatataaaaacaacaaatacttccatatggagcatttttcagagttttctaacccagtcttatttttctagtcagtaaacatttgtaaaaatactgtttcactaatacttactgttaactgtcttgagagaaaagaaaaatatgagagaactattgtttggggaagttcaagtgatctttcaatatcattactaacttcttccactttttccagaatttgaatattaacgctaaaggtgtaagacttcagatttcaaattaatctttctatattttttaaatttacagaatattatataacccactgctgaaaaagaaaaaaatgattgttttagaagttaaagtcaatattgattttaaatataagtaatgaaggcatatttccaataactagtgatatggcatcgttgcattttacagtatcttcaaaaatacagaatttatagaataatttctcctcatttaatatttttcaaaatcaaagttatggtttcctcattttactaaaatcgtattctaattcttcattatagtaaatctatgagcaactccttacttcggttcctctgatttcaaggccatattttaaaaaatcaaaaggcactgtgaactattttgaagaaaacacaacattttaatacagattgaaaggacctcttctgaagctagaaacaatctatagttatacatcttcattaatactgtgttaccttttaaaatagtaattttttacattttcctgtgtaaacctaattgtggtagaaatttttaccaactctatactcaatcaagcaaaatttctgtatattccctgtggaatgtacctatgtgagtttcagaaattctcaaaatacgtgttcaaaaatttctgcttttgcatctttgggacacctcagaaaacttattaacaactgtgaatatgagaaatacagaagaaaataataagccctctatacataaatgcccagcacaattcattgttaaaaaacaaccaaacctcacactactgtatttcattatctgtactgaaagcaaatgctttgtgactattaaatgttgcacatcattcattcactgtatagtaatcattgactaaagccatttgtctgtgttttcttcttgtggttgtatatatcaggtaaaatattttccaaagagccatgtgtcatgtaatactgaaccactttgatattgagacattaatttgtacccttgttattatctactagtaataatgtaatactgtagaaatattgctctaattcttttcaaaattgttgcatcccccttagaatgtttctatttccataaggatttaggtatgctattatcccttcttataccctaagatgaagctgtttttgtgctctttgttcatcattggccctcattccaagcactttacgctgtctgtaatgggatctatttttgcactggaatatctgagaattgcaaaactagacaaaagtttcacaacagatttctaagttaaatcattttcattaaaaggaaaaaagaaaaaaaattttgtatgtcaataactttatatgaagtattaaaatgcatatttctatgttgtaatataatgagtcacaaaataaagctgtgacagttctgttggtct

SEQ ID NO: 3 - DNA, 10026 bp, Homo sapiens
tgtcagctgctgctggaagtggcctggcctctatttatcttcctgatcctgatctctgttcggctgagctacccaccctatgaacaacatgaatgccattttccaaataaagccatgccctctgcaggaacacttccttgggttcaggggattatctgtaatgccaacaacccctgtttccgttacccgactcctggggaggctcccggagttgttggaaactttaacaaatccattgtggctcgcctgttctcagatgctcggaggcttcttttatacagccagaaagacaccagcatgaaggacatgcgcaaagttctgagaacattacagcagatcaagaaatccagctcaaacttgaagcttcaagatttcctggtggacaatgaaaccttctctgggttcctgtatcacaacctctctctcccaaagtctactgtggacaagatgctgagggctgatgtcattctccacaaggtatttttgcaaggctaccagttacatttgacaagtctgtgcaatggatcaaaatcagaagagatgattcaacttggtgaccaagaagtttctgagctttgtggcctaccaagggagaaactggctgcagcagagcgagtacttcgttccaacatggacatcctgaagccaatcctgagaacactaaactctacatctcccttcccgagcaaggagctggctgaagccacaaaaacattgctgcatagtcttgggactctggcccaggagctgttcagcatgagaagctggagtgacatgcgacaggaggtgatgtttctgaccaatgtgaacagctccagctcctccacccaaatctaccaggctgtgtctcgtattgtctgcgggcatcccgagggaggggggctgaagatcaagtctctcaactggtatgaggacaacaactacaaagccctctttggaggcaatggcactgaggaagatgctgaaaccttctatgacaactctacaactccttactgcaatgatttgatgaagaatttggagtctagtcctctttcccgcattatctggaaagctctgaagccgctgctcgttgggaagatcctgtatacacctgacactccagccacaaggcaggtcatggctgaggtgaacaagaccttccaggaactggctgtgttccatgatctggaaggcatgtgggaggaactcagccccaagatctggaccttcatggagaacagccaagaaatggaccttgtccggatgctgttggacagcagggacaatgaccacttttgggaacagcagttggatggcttagattggacagcccaagacatcgtggcgtttttggccaagcacccagaggatgtccagtccagtaatggttctgtgtacacctggagagaagctttcaacgagactaaccaggcaatccggaccatatctcgcttcatggagtgtgtcaacctgaacaagctagaacccatagcaacagaagtctggctcatcaacaagtccatggagctgctggatgagaggaagttctgggctggtattgtgttcactggaattactccaggcagcattgagctgccccatcatgtcaagtacaagatccgaatggacattgacaatgtggagaggacaaataaaatcaaggatgggtactgggaccctggtcctcgagctgacccctttgaggacatgcggtacgtctgggggggcttcgcctacttgcaggatgtggtggagcaggcaatcatcagggtgctgacgggcaccgagaagaaaactggtgtctatatgcaacagatgccctatccctgttacgttgatgacatctttctgcgggtgatgagccggtcaatgcccctcttcatgacgctggcctggatttactcagtggctgtgatcatcaagggcatcgtgtatgagaaggaggcacggctgaaagagaccatgcggatcatgggcctggacaacagcatcctctggtttagctggttcattagtagcctcattcctcttcttgtgagcgctggcctgctagtggtcatcctgaagttaggaaacctgctgccctacagtgatcccagcgtggtgtttgtcttcctgtccgtgtttgctgtggtgacaatcctgcagtgcttcctgattagcacactcttctccagagccaacctggcagcagcctgtgggggcatcatctacttcacgctgtacctgccctacgtcctgtgtgtggcatggcaggactacgtgggcttcacactcaagatcttcgctagcctgctgtctcctgtggcttttgggtttggctgtgagtactttgccctttttgaggagcagggcattggagtgcagtgggacaacctgtttgagagtcctgtggaggaagatggcttcaatctcaccacttcggtctccatgatgctgtttgacaccttcctctatggggtgatgacctggtacattgaggctgtctttccaggccagtacggaattcccaggccctggtattttccttgcaccaagtcctactggtttggcgaggaaagtgatgagaagagccaccctggttccaaccagaagagaatatcagaaatctgcatggaggaggaacccacccacttgaagctgggcgtgtccattcagaacctggtaaaagtctaccgagatgggatgaaggtggctgtcgatggcctggcactgaatttttatgagggccagatcacctccttcctgggccacaatggagcggggaagacgaccaccatgtcaatcctgaccgggttgttccccccgacctcgggcaccgcctacatcctgggaaaagacattcgctctgagatgagcaccatccggcagaacctgggggtctgtccccagcataacgtgctgtttgacatgctgactgtcgaagaacacatctggttctatgcccgcttgaaagggctctctgagaagcacgtgaaggcggagatggagcagatggccctggatgttggtttgccatcaagcaagctgaaaagcaaaacaagccagctgtcaggtggaatgcagagaaagctatctgtggccttggcctttgtcgggggatctaaggttgtcattctggatgaacccacagctggtgtggacccttactcccgcaggggaatatgggagctgctgctgaaataccgacaaggccgcaccattattctctctacacaccacatggatgaagcggacgtcctgggggacaggattgccatcatctcccatgggaagctgtgctgtgtgggctcctccctgtttctgaagaaccagctgggaacaggctactacctgaccttggtcaagaaagatgtggaatcctccctcagttcctgcagaaacagtagtagcactgtgtcatacctgaaaaaggaggacagtgtttctcagagcagttctgatgctggcctgggcagcgaccatgagagtgacacgctgaccatcgatgtctctgctatctccaacctcatcaggaagcatgtgtctgaagcccggctggtggaagacatagggcatgagctgacctatgtgctgccatatgaagctgctaaggagggagcctttgtggaactctttcatgagattgatgaccggctctcagacctgggcatttctagttatggcatctcagagacgaccctggaagaaatattcctcaaggtggccgaagagagtggggtggatgctgagacctcagatggtaccttgccagcaagacgaaacaggcgggccttcggggacaagcagagctgtcttcgcccgttcactgaagatgatgctgctgatccaaatgattctgacatagacccagaatccagagagacagacttgctcagtgggatggatggcaaagggtcctaccaggtgaaaggctggaaacttacacagcaacagtttgtggcccttttgtggaagagactgctaattgccagacggagtcggaaaggattttttgctcagattgtcttgccagctgtgtttgtctgcattgcccttgtgttcagcctgatcgtgccaccctttggcaagtaccccagcctggaacttcagccctggatgtacaacgaacagtacacatttgtcagcaatgatgctcctgaggacacgggaaccctggaactcttaaacgccctcaccaaagaccctggcttcgggacccgctgtatggaaggaaacccaatcccagacacgccctgccaggcaggggaggaagagtggaccactgccccagttccccagaccatcatggacctcttccagaatgggaactggacaatgcagaacccttcacctgcatgccagtgtagcagcgacaaaatcaagaagatgctgcctgtgtgtcccccaggggcaggggggctgcctcctccacaaagaaaacaaaacactgcagatatccttcaggacctgacaggaagaaacatttcggattatctggtgaagacgtatgtgcagatcatagccaaaagcttaaagaacaagatctgggtgaatgagtttaggtatggcggcttttccctgggtgtcagtaatactcaagcacttcctccgagtcaagaagttaatgatgccatcaaacaaatgaagaaacacctaaagctggccaaggacagttctgcagatcgatttctcaacagcttgggaagatttatgacaggactggacaccagaaataatgtcaaggtgtggttcaataacaagggctggcatgcaatcagctctttcctgaatgtcatcaacaatgccattctccgggccaacctgcaaaagggagagaaccctagccattatggaattactgctttcaatcatcccctgaatctcaccaagcagcagctctcagaggtggctctgatgaccacatcagtggatgtccttgtgtccatctgtgtcatctttgcaatgtccttcgtcccagccagctttgtcgtattcctgatccaggagcgggtcagcaaagcaaaacacctgcagttcatcagtggagtgaagcctgtcatctactggctctctaattttgtctgggatatgtgcaattacgttgtccctgccacactggtcattatcatcttcatctgcttccagcagaagtcctatgtgtcctccaccaatctgcctgtgctagcccttctacttttgctgtatgggtggtcaatcacacctctcatgtacccagcctcctttgtgttcaagatccccagcacagcctatgtggtgctcaccagcgtgaacctcttcattggcattaatggcagcgtggccacctttgtgctggagctgttcaccgacaataagctgaataatatcaatgatatcctgaagtccgtgttcttgatcttcccacatttttgcctgggacgagggctcatcgacatggtgaaaaaccaggcaatggctgatgccctggaaaggtttggggagaatcgctttgtgtcaccattatcttgggacttggtgggacgaaacctcttcgccatggccgtggaaggggtggtgttcttcctcattactgttctgatccagtacagattcttcatcaggcccagacctgtaaatgcaaagctatctcctctgaatgatgaagatgaagatgtgaggcgggaaagacagagaattcttgatggtggaggccagaatgacatcttagaaatcaaggagttgacgaagatatatagaaggaagcggaagcctgctgttgacaggatttgcgtgggcattcctcctggtgagtgctttgggctcctgggagttaatggggctggaaaatcatcaactttcaagatgttaacaggagataccactgttaccagaggagatgctttccttaacaaaaatagtatcttatcaaacatccatgaagtacatcagaacatgggctactgccctcagtttgatgccatcacagagctgttgactgggagagaacacgtggagttctttgcccttttgagaggagtcccagagaaagaagttggcaaggttggtgagtgggcgattcggaaactgggcctcgtgaagtatggagaaaaatatgctggtaactatagtggaggcaacaaacgcaagctctctacagccatggctttgatcggcgggcctcctgtggtgtttctggatgaacccaccacaggcatggatcccaaagcccggcggttcttgtggaattgtgccctaagtgttgtcaaggaggggagatcagtagtgcttacatctcatagtatggaagaatgtgaagctctttgcactaggatggcaatcatggtcaatggaaggttcaggtgccttggcagtgtccagcatctaaaaaataggtttggagatggttatacaatagttgtacgaatagcagggtccaacccggacctgaagcctgtccaggatttctttggacttgcatttcctggaagtgttctaaaagagaaacaccggaacatgctacaataccagcttccatcttcattatcttctctggccaggatattcagcatcctctcccagagcaaaaagcgactccacatagaagactactctgtttctcagacaacacttgaccaagtatttgtgaactttgccaaggaccaaagtgatgatgaccacttaaaagacctctcattacacaaaaaccagacagtagtggacgttgcagttctcacatcttttctacaggatgagaaagtgaaagaaagctatgtatgaagaatcctgttcatacggggtggctgaaagtaaagaggaactagactttcctttgcaccatgtgaagtgttgtggagaaaagagccagaagttgatgtgggaagaagtaaactggatactgtactgatactattcaatgcaatgcaattcaatgcaatgaaaacaaaattccattacaggggcagtgcctttgtagcctatgtcttgtatggctctcaagtgaaagacttgaatttagttttttacctatacctatgtgaaactctattatggaacccaatggacatatgggtttgaactcacacttttttttttttttttgttcctgtgtattctcattggggttgcaacaataattcatcaagtaatcatggccagcgattattgatcaaaatcaaaaggtaatgcacatcctcattcactaagccatgccatgcccaggagactggtttcccggtgacacatccattgctggcaatgagtgtgccagagttattagtgccaagtttttcagaaagtttgaagcaccatggtgtgtcatgctcacttttgtgaaagctgctctgctcagagtctatcaacattgaatatcagttgacagaatggtgccatgcgtggctaacatcctgctttgattccctctgataagctgttctggtggcagtaacatgcaacaaaaatgtgggtgtctccaggcacgggaaacttggttccattgttatattgtcctatgcttcgagccatgggtctacagggtcatccttatgagactcttaaatatacttagatcctggtaagaggcaaagaatcaacagccaaactgctggggctgcaagctgctgaagccagggcatgggattaaagagattgtgcgttcaaacctagggaagcctgtgcccatttgtcctgactgtctgctaacatggtacactgcatctcaagatgtttatctgacacaagtgtattatttctggctttttgaattaatctagaaaatgaaaagatggagttgtattttgacaaaaatgtttgtactttttaatgttatttggaattttaagttctatcagtgacttctgaatccttagaatggcctctttgtagaaccctgtggtatagaggagtatggccactgccccactatttttattttcttatgtaagtttgcatatcagtcatgactagtgcctagaaagcaatgtgatggtcaggatctcatgacattatatttgagtttctttcagatcatttaggatactcttaatctcacttcatcaatcaaatattttttgagtgtatgctgtagctgaaagagtatgtacgtacgtataagactagagagatattaagtctcagtacacttcctgtgccatgttattcagctcactggtttacaaatataggttgtcttgtggttgtaggagcccactgtaacaatactgggcagcctttttttttttttttttaattgcaacaatgcaaaagccaagaaagtataagggtcacaagtctaaacaatgaattcttcaacagggaaaacagctagcttgaaaacttgctgaaaaacacaacttgtgtttatggcatttagtaccttcaaataattggctttgcagatattggataccccattaaatctgacagtctcaaatttttcatctcttcaatcactagtcaagaaaaatataaaaacaacaaatacttccatatggagcatttttcagagttttctaacccagtcttatttttctagtcagtaaacatttgtaaaaatactgtttcactaatacttactgttaactgtcttgagagaaaagaaaaatatgagagaactattgtttggggaagttcaagtgatctttcaatatcattactaacttcttccactttttccagaatttgaatattaacgctaaaggtgtaagacttcagatttcaaattaatctttctatattttttaaatttacagaatattatataacccactgctgaaaaagaaaaaaatgattgttttagaagttaaagtcaatattgattttaaatataagtaatgaaggcatatttccaataactagtgatatggcatcgttgcattttacagtatcttcaaaaatacagaatttatagaataatttctcctcatttaatatttttcaaaatcaaagttatggtttcctcattttactaaaatcgtattctaattcttcattatagtaaatctatgagcaactccttacttcggttcctctgatttcaaggccatattttaaaaaatcaaaaggcactgtgaactattttgaagaaaacacaacattttaatacagattgaaaggacctcttctgaagctagaaacaatctatagttatacatcttcattaatactgtgttaccttttaaaatagtaattttttacattttcctgtgtaaacctaattgtggtagaaatttttaccaactctatactcaatcaagcaaaatttctgtatattccctgtggaatgtacctatgtgagtttcagaaattctcaaaatacgtgttcaaaaatttctgcttttgcatctttgggacacctcagaaaacttattaacaactgtgaatatgagaaatacagaagaaaataataagccctctatacataaatgcccagcacaattcattgttaaaaaacaaccaaacctcacactactgtatttcattatctgtactgaaagcaaatgctttgtgactattaaatgttgcacatcattcattcactgtatagtaatcattgactaaagccatttgtctgtgttttcttcttgtggttgtatatatcaggtaaaatattttccaaagagccatgtgtcatgtaatactgaaccactttgatattgagacattaatttgtacccttgttattatctactagtaataatgtaatactgtagaaatattgctctaattcttttcaaaattgttgcatcccccttagaatgtttctatttccataaggatttaggtatgctattatcccttcttataccctaagatgaagctgtttttgtgctctttgttcatcattggccctcattccaagcactttacgctgtctgtaatgggatctatttttgcactggaatatctgagaattgcaaaactagacaaaagtttcacaacagatttctaagttaaatcattttcattaaaaggaaaaaagaaaaaaaattttgtatgtcaataactttatatgaagtattaaaatgcatatttctatgttgtaatataatgagtcacaaaataaagctgtgacagttctgttggtct

SEQ ID NO: 4 - DNA, 1859 bp, Homo sapiens
gtaattgcgagcgagagtgagtggggccgggacccgcagagccgagccgacccttctctcccgggctgcggcagggcagggcggggagctccgcgcaccaacagagccggttctcagggcgctttgctccttgttttttccccggttctgttttctccccttctccggaaggcttgtcaaggggtaggagaaagagacgcaaacacaaaagtggaaaacagttaatgaccagccacggcgtccctgctgtgagctctggccgctgccttccagggctcccgagccacacgctgggggtgctggctgagggaacatggcttgttggcctcagctgaggttgctgctgtggaagaacctcactttcagaagaagacaaacatgtcagctgctgctggaagtggcctggcctctatttatcttcctgatcctgatctctgttcggctgagctacccaccctatgaacaacatgaatgccattttccaaataaagccatgccctctgcaggaacacttccttgggttcaggggattatctgtaatgccaacaacccctgtttccgttacccgactcctggggaggctcccggagttgttggaaactttaacaaatccattgtggctcgcctgttctcagatgctcggaggcttcttttatacagccagaaagacaccagcatgaaggacatgcgcaaagttctgagaacattacagcagatcaagaaatccagctcaaacttgaagcttcaagatttcctggtggacaatgaaaccttctctgggttcctgtatcacaacctctctctcccaaagtctactgtggacaagatgctgagggctgatgtcattctccacaaggtatttttgcaaggctaccagttacatttgacaagtctgtgcaatggatcaaaatcagaagagatgattcaacttggtgaccaagaagtttctgagctttgtggcctaccaagggagaaactggctgcagcagagcgagtacttcgttccaacatggacatcctgaagccaatcctggtgagtagacttgctcactggagaaacttcaagcactaatgctttcggaatgtgaggcttttccttggacagcatgactttgttttgtagaaaagtacggctggctgggagtttgtgatataatttagttcagtggtattctaagtgttcttagtgttctttcagacttttgggccatctcccaaagggtgaatgggaagaataagctgggtgtggctgagtttaagccaaaagttttttgtgcttgtttcaatcagagaagacctgctttttcatgtttttactattataatactaagcaagagctcatttgaaaacagagttcttcatatttaaaaaaaaaaagtcttgaaaccattgatgggaagatggatatctatttatgtttaaaaacccatcataaagatgacattgtgggctgtcacagttggaaggccctggaattagatgagaccacactatttagcttacttagtaataacattgcaaagaaaaattccgacgaagttttttcagcctaggaatcaatagttcagagaagcactctatgagaatacccattcattcttaaccaaaaaatactggtgagcctgagcagtttggtcatcagagtgttttatatagttccagaacaaatatgtctctaggtgttctgagagctctggtgaaattcctctcgctaccccaaacatcatcatttaatatccaggattctggttttctactcaccagatagattctcttaaaaccagggaaagattcctggaggaaggatgtatctggaaagagatgttccttattataataaaatgaaattgtaatactc

SEQ ID NO: 5 - DNA, 1402 bp, Homo sapiens
gtaattgcgagcgagagtgagtggggccgggacccgcagagccgagccgacccttctctcccgggctgcggcagggcagggcggggagctccgcgcaccaacagagccggttctcagggcgctttgctccttgttttttccccggttctgttttctccccttctccggaaggcttgtcaaggggtaggagaaagagacgcaaacacaaaagtggaaaacagttaatgaccagccacggcgtccctgctgtgagctctggccgctgccttccagggctcccgagccacacgctgggggtgctggctgagggaacatggcttgttggcctcagctgaggttgctgctgtggaagaacctcactttcagaagaagacaaacatgtcagctgctgctggaagtggcctggcctctatttatcttcctgatcctgatctctgttcggctgagctacccaccctatgaacaacatgaatgccattttccaaataaagccatgccctctgcaggaacacttccttgggttcaggggattatctgtaatgccaacaacccctgtttccgttacccgactcctggggaggctcccggagttgttggaaactttaacaaatccattgtggctcgcctgttctcagatgctcggaggcttcttttatacagccagaaagacaccagcatgaaggacatgcgcaaagttctgagaacattacagcagatcaagaaatccagctcaaacttgaagcttcaagatttcctggtggacaatgaaaccttctctgggttcctgtatcacaacctctctctcccaaagtctactgtggacaagatgctgagggctgatgtcattctccacaaggtatttttgcaaggctaccagttacatttgacaagtctgtgcaatggatcaaaatcagaagagatgattcaacttggtgaccaagaagtttctgagctttgtggcctaccaagggagaaactggctgcagcagagcgagtacttcgttccaacatggacatcctgaagccaatcctgatggatgtgacatgtgatgacattgcacatgggcagttaactgtgccaagaagtgcagcagtagcagcaaccggagatgcaaagcccaacatgatggggagagaaactcttctttcaatatgtgcttctgtaccaaaagtggaatttcacgagagacatattttgaaacatttctccttttgtgtgtgcgtgagtgtttccctgtttccagccaagggtattgtgagtttctcctgggcctccttcagaatctgggtgctctggaaagcagtgttttggcaacatggggaaagtatggcagtgtgggagggtcagctgggtctgggtttgaatattgcatttgaatattttaccagcattgatgtcgga

SEQ ID NO: 6 - DNA, 3715 bp, Homo sapiens
tttcattttttcaagtggaaccatggaggagagtggctgcccaaggtggggtttgtcttttgctgtctgagtggcccctgggatgcagggcgggtttctcaacggtgacttgtgggcagtgccttctgctgagcgagtcatggcccgaaggcagaactaactgtgcctgcagtcttcactctcaggatgcagccgaggtgggcccaaggggccacgatgtggcttggagtcctgctgacccttctgctctgttcaagccttgagggtcaagaaaactctttcacaatcaacagtgttgacatgaagagcctgccggactggacggtgcaaaatgggaagaacctgaccctgcagtgcttcgcggatgtcagcaccacctctcacgtcaagcctcagcaccagatgctgttctataaggatgacgtgctgttttacaacatctcctccatgaagagcacagagagttattttattcctgaagtccggatctatgactcagggacatataaatgtactgtgattgtgaacaacaaagagaaaaccactgcagagtaccaggtgttggtggaaggagtgcccagtcccagggtgacactggacaagaaagaggccatccaaggtgggatcgtgagggtcaactgttctgtcccagaggaaaaggccccaatacacttcacaattgaaaaacttgaactaaatgaaaaaatggtcaagctgaaaagagagaagaattctcgagaccagaattttgtgatactggaattccccgttgaggaacaggaccgcgttttatccttccgatgtcaagctaggatcatttctgggatccatatgcagacctcagaatctaccaagagtgaactggtcaccgtgacggaatccttctctacacccaagttccacatcagccccaccggaatgatcatggaaggagctcagctccacattaagtgcaccattcaagtgactcacctggcccaggagtttccagaaatcataattcagaaggacaaggcgattgtggcccacaacagacatggcaacaaggctgtgtactcagtcatggccatggtggagcacagtggcaactacacgtgcaaagtggagtccagccgcatatccaaggtcagcagcatcgtggtcaacataacagaactattttccaagcccgaactggaatcttccttcacacatctggaccaaggtgaaagactgaacctgtcctgctccatcccaggagcacctccagccaacttcaccatccagaaggaagatacgattgtgtcacagactcaagatttcaccaagatagcctcaaagtcggacagtgggacgtatatctgcactgcaggtattgacaaagtggtcaagaaaagcaacacagtccagatagtcgtatgtgaaatgctctcccagcccaggatttcttatgatgcccagtttgaggtcataaaaggacagaccatcgaagtccgttgcgaatcgatcagtggaactttgcctatttcttaccaacttttaaaaacaagtaaagttttggagaatagtaccaagaactcaaatgatcctgcggtattcaaagacaaccccactgaagacgtcgaataccagtgtgttgcagataattgccattcccacgccaaaatgttaagtgaggttctgagggtgaaggtgatagccccggtggatgaggtccagatttctatcctgtcaagtaaggtggtggagtctggagaggacattgtgctgcaatgtgctgtgaatgaaggatctggtcccatcacctataagttttacagagaaaaagagggcaaacccttctatcaaatgacctcaaatgccacccaggcattttggaccaagcagaaggctaacaaggaacaggagggagagtattactgcacagccttcaacagagccaaccacgcctccagtgtccccagaagcaaaatactgacagtcagagtcattcttgccccatggaagaaaggacttattgcagtggttatcatcggagtgatcattgctctcttgatcattgcggccaaatgttattttctgaggaaagccaaggccaagcagatgccagtggaaatgtccaggccagcagtaccacttctgaactccaacaacgagaaaatgtcagatcccaatatggaagctaacagtcattacggtcacaatgacgatgtcggaaaccatgcaatgaaaccaataaatgataataaagagcctctgaactcagacgtgcagtacacggaagttcaagtgtcctcagctgagtctcacaaagatctaggaaagaaggacacagagacagtgtacagtgaagtccggaaagctgtccctgatgccgtggaaagcagatactctagaacggaaggctcccttgatggaacttagacagcaaggccagatgcacatccctggaaggacatccatgttccgagaagaacagataatccctgtatttcaagacctctgtgcacttatttatgaacctgccctgctcccacagaacacagcaattcctcaggctaagctgccggttcttaaatccatcctgctaagttaatgttgggtagaaagagatacagaggggctgttgaatttcccacataccctccttccaccaagttggaacatccttggaaattggaagagcacaagaggagatccagggcaaggccattgggatattctgaaacttgaatattttgttttgtgcagagataaagaccttttccatgcaccctcatacacagaaaccaattttcttttttatactcaatcatttctagcgcatggcctggttagaggctggttttttctcttttcctttggtccttcaaaggcttgtagttttggctagtccttgttctttggaaatacacagtgctgaccagacagcctccccctgtcccctctatgacctcgccctccacaaatgggaaaaccagactacttgggagcaccgcctgtgaaataccaacctgaagacaccgttcattcaggcaacgcacaaaacagaaaatgaaggtggaacaagcacagatgttcttcaactgtttttgtctacactctttctcttttcctctaccatgctgaaggctgaaagacaggaagatggtgccatcagcaaatattattcttaattgaaaacttgaaatgtgtatgtttcttactaatttttaaaaatgtattccttgccagggcaggcaaggtggctcacgcctgtaatcccagcacttcaggaggctgaggtgggcggatcacctgaggtcaggagtttgagaccagcctgatgaaaccctgtctctactaaaaatacaagaattagccgggcgtggtggcgcatgcctgtagtatcagctactcaagaggctgaggtgagattatcgcttgaacccaggaaacggaggttgtagtgagcggagatcgcgccactgcactccagcctgagtgacagagtgagaatccatctcaaaaaaaacaaaaaacaaaattgcttgctaaagaagtggtctcctgaggtcttaagacattcctgacagtgtcttgagtgggtgggagagaggttgctgtcattgcgctgtggaatttcacagatgagaaccacgcctagccaaaatcacttttcctgtttgcctcagtgacacagctgcagggaccctcgtggatgttgtattaaataaatttgacctttgctctttgc

SEQ ID NO: 7 - DNA, 3747 bp, Homo sapiens
ccagcccaggccccattgttcccggtttccagccatggctgccattacctgaccagcgccacagccggtctctctgcaggcgccgggagaagtgaccagagcaatttctgcttttcacagggcgggtttctcaacggtgacttgtgggcagtgccttctgctgagcgagtcatggcccgaaggcagaactaactgtgcctgcagtcttcactctcaggatgcagccgaggtgggcccaaggggccacgatgtggcttggagtcctgctgacccttctgctctgttcaagccttgagggtcaagaaaactctttcacaatcaacagtgttgacatgaagagcctgccggactggacggtgcaaaatgggaagaacctgaccctgcagtgcttcgcggatgtcagcaccacctctcacgtcaagcctcagcaccagatgctgttctataaggatgacgtgctgttttacaacatctcctccatgaagagcacagagagttattttattcctgaagtccggatctatgactcagggacatataaatgtactgtgattgtgaacaacaaagagaaaaccactgcagagtaccaggtgttggtggaaggagtgcccagtcccagggtgacactggacaagaaagaggccatccaaggtgggatcgtgagggtcaactgttctgtcccagaggaaaaggccccaatacacttcacaattgaaaaacttgaactaaatgaaaaaatggtcaagctgaaaagagagaagaattctcgagaccagaattttgtgatactggaattccccgttgaggaacaggaccgcgttttatccttccgatgtcaagctaggatcatttctgggatccatatgcagacctcagaatctaccaagagtgaactggtcaccgtgacggaatccttctctacacccaagttccacatcagccccaccggaatgatcatggaaggagctcagctccacattaagtgcaccattcaagtgactcacctggcccaggagtttccagaaatcataattcagaaggacaaggcgattgtggcccacaacagacatggcaacaaggctgtgtactcagtcatggccatggtggagcacagtggcaactacacgtgcaaagtggagtccagccgcatatccaaggtcagcagcatcgtggtcaacataacagaactattttccaagcccgaactggaatcttccttcacacatctggaccaaggtgaaagactgaacctgtcctgctccatcccaggagcacctccagccaacttcaccatccagaaggaagatacgattgtgtcacagactcaagatttcaccaagatagcctcaaagtcggacagtgggacgtatatctgcactgcaggtattgacaaagtggtcaagaaaagcaacacagtccagatagtcgtatgtgaaatgctctcccagcccaggatttcttatgatgcccagtttgaggtcataaaaggacagaccatcgaagtccgttgcgaatcgatcagtggaactttgcctatttcttaccaacttttaaaaacaagtaaagttttggagaatagtaccaagaactcaaatgatcctgcggtattcaaagacaaccccactgaagacgtcgaataccagtgtgttgcagataattgccattcccacgccaaaatgttaagtgaggttctgagggtgaaggtgatagccccggtggatgaggtccagatttctatcctgtcaagtaaggtggtggagtctggagaggacattgtgctgcaatgtgctgtgaatgaaggatctggtcccatcacctataagttttacagagaaaaagagggcaaacccttctatcaaatgacctcaaatgccacccaggcattttggaccaagcagaaggctaacaaggaacaggagggagagtattactgcacagccttcaacagagccaaccacgcctccagtgtccccagaagcaaaatactgacagtcagagtcattcttgccccatggaagaaaggacttattgcagtggttatcatcggagtgatcattgctctcttgatcattgcggccaaatgttattttctgaggaaagccaaggccaagcagatgccagtggaaatgtccaggccagcagtaccacttctgaactccaacaacgagaaaatgtcagatcccaatatggaagctaacagtcattacggtcacaatgacgatgtcggaaaccatgcaatgaaaccaataaatgataataaagagcctctgaactcagacgtgcagtacacggaagttcaagtgtcctcagctgagtctcacaaagatctaggaaagaaggacacagagacagtgtacagtgaagtccggaaagctgtccctgatgccgtggaaagcagatactctagaacggaaggctcccttgatggaacttagacagcaaggccagatgcacatccctggaaggacatccatgttccgagaagaacagataatccctgtatttcaagacctctgtgcacttatttatgaacctgccctgctcccacagaacacagcaattcctcaggctaagctgccggttcttaaatccatcctgctaagttaatgttgggtagaaagagatacagaggggctgttgaatttcccacataccctccttccaccaagttggaacatccttggaaattggaagagcacaagaggagatccagggcaaggccattgggatattctgaaacttgaatattttgttttgtgcagagataaagaccttttccatgcaccctcatacacagaaaccaattttcttttttatactcaatcatttctagcgcatggcctggttagaggctggttttttctcttttcctttggtccttcaaaggcttgtagttttggctagtccttgttctttggaaatacacagtgctgaccagacagcctccccctgtcccctctatgacctcgccctccacaaatgggaaaaccagactacttgggagcaccgcctgtgaaataccaacctgaagacaccgttcattcaggcaacgcacaaaacagaaaatgaaggtggaacaagcacagatgttcttcaactgtttttgtctacactctttctcttttcctctaccatgctgaaggctgaaagacaggaagatggtgccatcagcaaatattattcttaattgaaaacttgaaatgtgtatgtttcttactaatttttaaaaatgtattccttgccagggcaggcaaggtggctcacgcctgtaatcccagcacttcaggaggctgaggtgggcggatcacctgaggtcaggagtttgagaccagcctgatgaaaccctgtctctactaaaaatacaagaattagccgggcgtggtggcgcatgcctgtagtatcagctactcaagaggctgaggtgagattatcgcttgaacccaggaaacggaggttgtagtgagcggagatcgcgccactgcactccagcctgagtgacagagtgagaatccatctcaaaaaaaacaaaaaacaaaattgcttgctaaagaagtggtctcctgaggtcttaagacattcctgacagtgtcttgagtgggtgggagagaggttgctgtcattgcgctgtggaatttcacagatgagaaccacgcctagccaaaatcacttttcctgtttgcctcagtgacacagctgcagggaccctcgtggatgttgtattaaataaatttgacctttgctctttgc

SEQ ID NO: 8 - DNA, 8371 bp, Homo sapiens
ggcggggcggggacagcccggcgggtctctcctcccccgcgccccgggcctccagaggggcgggaggggaccgtcccatataagccccggctcccggcgctcggacgcccgcgccggctgtgctgcacagggggaggagagggaaccccaggcgcgagcgggaagaggggacctgcagccacaacttctctggtcctctgcatcccttctgtccctccacccgtccccttccccaccctctggcccccaccttcttggaggcgacaacccccgggaggcattagaagggatttttcccgcaggttgcgaagggaagcaaacttggtggcaacttgcctcccggtgcgggcgtctctcccccaccgtctcaacatgcttaggggtccggggcccgggctgctgctgctggccgtcctgtgcctggggacagcggtgccctccacgggagcctcgaagagcaagaggcaggctcagcaaatggttcagccccagtccccggtggctgtcagtcaaagcaagcccggttgttatgacaatggaaaacactatcagataaatcaacagtgggagcggacctacctaggcaatgcgttggtttgtacttgttatggaggaagccgaggttttaactgcgagagtaaacctgaagctgaagagacttgctttgacaagtacactgggaacacttaccgagtgggtgacacttatgagcgtcctaaagactccatgatctgggactgtacctgcatcggggctgggcgagggagaataagctgtaccatcgcaaaccgctgccatgaagggggtcagtcctacaagattggtgacacctggaggagaccacatgagactggtggttacatgttagagtgtgtgtgtcttggtaatggaaaaggagaatggacctgcaagcccatagctgagaagtgttttgatcatgctgctgggacttcctatgtggtcggagaaacgtgggagaagccctaccaaggctggatgatggtagattgtacttgcctgggagaaggcagcggacgcatcacttgcacttctagaaatagatgcaacgatcaggacacaaggacatcctatagaattggagacacctggagcaagaaggataatcgaggaaacctgctccagtgcatctgcacaggcaacggccgaggagagtggaagtgtgagaggcacacctctgtgcagaccacatcgagcggatctggccccttcaccgatgttcgtgcagctgtttaccaaccgcagcctcacccccagcctcctccctatggccactgtgtcacagacagtggtgtggtctactctgtggggatgcagtggctgaagacacaaggaaataagcaaatgctttgcacgtgcctgggcaacggagtcagctgccaagagacagctgtaacccagacttacggtggcaactcaaatggagagccatgtgtcttaccattcacctacaatggcaggacgttctactcctgcaccacagaagggcgacaggacggacatctttggtgcagcacaacttcgaattatgagcaggaccagaaatactctttctgcacagaccacactgttttggttcagactcgaggaggaaattccaatggtgccttgtgccacttccccttcctatacaacaaccacaattacactgattgcacttctgagggcagaagagacaacatgaagtggtgtgggaccacacagaactatgatgccgaccagaagtttgggttctgccccatggctgcccacgaggaaatctgcacaaccaatgaaggggtcatgtaccgcattggagatcagtgggataagcagcatgacatgggtcacatgatgaggtgcacgtgtgttgggaatggtcgtggggaatggacatgcattgcctactcgcagcttcgagatcagtgcattgttgatgacatcacttacaatgtgaacgacacattccacaagcgtcatgaagaggggcacatgctgaactgtacatgcttcggtcagggtcggggcaggtggaagtgtgatcccgtcgaccaatgccaggattcagagactgggacgttttatcaaattggagattcatgggagaagtatgtgcatggtgtcagataccagtgctactgctatggccgtggcattggggagtggcattgccaacctttacagacctatccaagctcaagtggtcctgtcgaagtatttatcactgagactccgagtcagcccaactcccaccccatccagtggaatgcaccacagccatctcacatttccaagtacattctcaggtggagacctaaaaattctgtaggccgttggaaggaagctaccataccaggccacttaaactcctacaccatcaaaggcctgaagcctggtgtggtatacgagggccagctcatcagcatccagcagtacggccaccaagaagtgactcgctttgacttcaccaccaccagcaccagcacacctgtgaccagcaacaccgtgacaggagagacgactcccttttctcctcttgtggccacttctgaatctgtgaccgaaatcacagccagtagctttgtggtctcctgggtctcagcttccgacaccgtgtcgggattccgggtggaatatgagctgagtgaggagggagatgagccacagtacctggatcttccaagcacagccacttctgtgaacatccctgacctgcttcctggccgaaaatacattgtaaatgtctatcagatatctgaggatggggagcagagtttgatcctgtctacttcacaaacaacagcgcctgatgccccacctgacccgactgtggaccaagttgatgacacctcaattgttgttcgctggagcagaccccaggctcccatcacagggtacagaatagtctattcgccatcagtagaaggtagcagcacagaactcaaccttcctgaaactgcaaactccgtcaccctcagtgacttgcaacctggtgttcagtataacatcactatctatgctgtggaagaaaatcaagaaagtacacctgttgtcattcaacaagaaaccactggcaccccacgctcagatacagtgccctctcccagggacctgcagtttgtggaagtgacagacgtgaaggtcaccatcatgtggacaccgcctgagagtgcagtgaccggctaccgtgtggatgtgatccccgtcaacctgcctggcgagcacgggcagaggctgcccatcagcaggaacacctttgcagaagtcaccgggctgtcccctggggtcacctattacttcaaagtctttgcagtgagccatgggagggagagcaagcctctgactgctcaacagacaaccaaactggatgctcccactaacctccagtttgtcaatgaaactgattctactgtcctggtgagatggactccacctcgggcccagataacaggataccgactgaccgtgggccttacccgaagaggacagcccaggcagtacaatgtgggtccctctgtctccaagtacccactgaggaatctgcagcctgcatctgagtacaccgtatccctcgtggccataaagggcaaccaagagagccccaaagccactggagtctttaccacactgcagcctgggagctctattccaccttacaacaccgaggtgactgagaccaccattgtgatcacatggacgcctgctccaagaattggttttaagctgggtgtacgaccaagccagggaggagaggcaccacgagaagtgacttcagactcaggaagcatcgttgtgtccggcttgactccaggagtagaatacgtctacaccatccaagtcctgagagatggacaggaaagagatgcgccaattgtaaacaaagtggtgacaccattgtctccaccaacaaacttgcatctggaggcaaaccctgacactggagtgctcacagtctcctgggagaggagcaccaccccagacattactggttatagaattaccacaacccctacaaacggccagcagggaaattctttggaagaagtggtccatgctgatcagagctcctgcacttttgataacctgagtcccggcctggagtacaatgtcagtgtttacactgtcaaggatgacaaggaaagtgtccctatctctgataccatcatcccagctgttcctcctcccactgacctgcgattcaccaacattggtccagacaccatgcgtgtcacctgggctccacccccatccattgatttaaccaacttcctggtgcgttactcacctgtgaaaaatgaggaagatgttgcagagttgtcaatttctccttcagacaatgcagtggtcttaacaaatctcctgcctggtacagaatatgtagtgagtgtctccagtgtctacgaacaacatgagagcacacctcttagaggaagacagaaaacaggtcttgattccccaactggcattgacttttctgatattactgccaactcttttactgtgcactggattgctcctcgagccaccatcactggctacaggatccgccatcatcccgagcacttcagtgggagacctcgagaagatcgggtgccccactctcggaattccatcaccctcaccaacctcactccaggcacagagtatgtggtcagcatcgttgctcttaatggcagagaggaaagtcccttattgattggccaacaatcaacagtttctgatgttccgagggacctggaagttgttgctgcgacccccaccagcctactgatcagctgggatgctcctgctgtcacagtgagatattacaggatcacttacggagaaacaggaggaaatagccctgtccaggagttcactgtgcctgggagcaagtctacagctaccatcagcggccttaaacctggagttgattataccatcactgtgtatgctgtcactggccgtggagacagccccgcaagcagcaagccaatttccattaattaccgaacagaaattgacaaaccatcccagatgcaagtgaccgatgttcaggacaacagcattagtgtcaagtggctgccttcaagttcccctgttactggttacagagtaaccaccactcccaaaaatggaccaggaccaacaaaaactaaaactgcaggtccagatcaaacagaaatgactattgaaggcttgcagcccacagtggagtatgtggttagtgtctatgctcagaatccaagcggagagagtcagcctctggttcagactgcagtaaccaacattgatcgccctaaaggactggcattcactgatgtggatgtcgattccatcaaaattgcttgggaaagcccacaggggcaagtttccaggtacagggtgacctactcgagccctgaggatggaatccatgagctattccctgcacctgatggtgaagaagacactgcagagctgcaaggcctcagaccgggttctgagtacacagtcagtgtggttgccttgcacgatgatatggagagccagcccctgattggaacccagtccacagctattcctgcaccaactgacctgaagttcactcaggtcacacccacaagcctgagcgcccagtggacaccacccaatgttcagctcactggatatcgagtgcgggtgacccccaaggagaagaccggaccaatgaaagaaatcaaccttgctcctgacagctcatccgtggttgtatcaggacttatggtggccaccaaatatgaagtgagtgtctatgctcttaaggacactttgacaagcagaccagctcagggtgttgtcaccactctggagaatgtcagcccaccaagaagggctcgtgtgacagatgctactgagaccaccatcaccattagctggagaaccaagactgagacgatcactggcttccaagttgatgccgttccagccaatggccagactccaatccagagaaccatcaagccagatgtcagaagctacaccatcacaggtttacaaccaggcactgactacaagatctacctgtacaccttgaatgacaatgctcggagctcccctgtggtcatcgacgcctccactgccattgatgcaccatccaacctgcgtttcctggccaccacacccaattccttgctggtatcatggcagccgccacgtgccaggattaccggctacatcatcaagtatgagaagcctgggtctcctcccagagaagtggtccctcggccccgccctggtgtcacagaggctactattactggcctggaaccgggaaccgaatatacaatttatgtcattgccctgaagaataatcagaagagcgagcccctgattggaaggaaaaagacagacgagcttccccaactggtaacccttccacaccccaatcttcatggaccagagatcttggatgttccttccacagttcaaaagacccctttcgtcacccaccctgggtatgacactggaaatggtattcagcttcctggcacttctggtcagcaacccagtgttgggcaacaaatgatctttgaggaacatggttttaggcggaccacaccgcccacaacggccacccccataaggcataggccaagaccatacccgccgaatgtaggtgaggaaatccaaattggtcacatccccagggaagatgtagactatcacctgtacccacacggtccgggactcaatccaaatgcctctacaggacaagaagctctctctcagacaaccatctcatgggccccattccaggacacttctgagtacatcatttcatgtcatcctgttggcactgatgaagaacccttacagttcagggttcctggaacttctaccagtgccactctgacaggcctcaccagaggtgccacctacaacatcatagtggaggcactgaaagaccagcagaggcataaggttcgggaagaggttgttaccgtgggcaactctgtcaacgaaggcttgaaccaacctacggatgactcgtgctttgacccctacacagtttcccattatgccgttggagatgagtgggaacgaatgtctgaatcaggctttaaactgttgtgccagtgcttaggctttggaagtggtcatttcagatgtgattcatctagatggtgccatgacaatggtgtgaactacaagattggagagaagtgggaccgtcagggagaaaatggccagatgatgagctgcacatgtcttgggaacggaaaaggagaattcaagtgtgaccctcatgaggcaacgtgttacgatgatgggaagacataccacgtaggagaacagtggcagaaggaatatctcggtgccatttgctcctgcacatgctttggaggccagcggggctggcgctgtgacaactgccgcagacctgggggtgaacccagtcccgaaggcactactggccagtcctacaaccagtattctcagagataccatcagagaacaaacactaatgttaattgcccaattgagtgcttcatgcctttagatgtacaggctgacagagaagattcccgagagtaaatcatctttccaatccagaggaacaagcatgtctctctgccaagatccatctaaactggagtgatgttagcagacccagcttagagttcttctttctttcttaagccctttgctctggaggaagttctccagcttcagctcaactcacagcttctccaagcatcaccctgggagtttcctgagggttttctcataaatgagggctgcacattgcctgttctgcttcgaagtattcaataccgctcagtattttaaatgaagtgattctaagatttggtttgggatcaataggaaagcatatgcagccaaccaagatgcaaatgttttgaaatgattgtctggcccgcaatactgtaggaacaagcatgatcttgttactgtgatattttaaatatccacagtactcactttttccaaatgatcctagtaattgcctagaaatatctttctcttacctgttatttatcaatttttcccagtatttttatacggaaaaaattgtattgaaaacacttagtatgcagttgataagaggaatttggtataattatggtgggtgattattttttatactgtatgtgccaaagctttactactgtggaaagacaactgttttaataaaagatttacattccacaacttgaagttcatctatttgatataagacaccttcgggggaaataattcctgtgaatattctttttcaattcagcaaacatttgaaaatctatgatgtgcaagtctaattgttgatttcagtacaagattttctaaatcagttgctacaaaaactgattggtttttgtcacttcatctcttcactaatggagatagcttt

SEQ ID NO: 9 - DNA, 8226 bp, Homo sapiens
ggcggggcggggacagcccggcgggtctctcctcccccgcgccccgggcctccagaggggcgggaggggaccgtcccatataagccccggctcccggcgctcggacgcccgcgccggctgtgctgcacagggggaggagagggaaccccaggcgcgagcgggaagaggggacctgcagccacaacttctctggtcctctgcatcccttctgtccctccacccgtccccttccccaccctctggcccccaccttcttggaggcgacaacccccgggaggcattagaagggatttttcccgcaggttgcgaagggaagcaaacttggtggcaacttgcctcccggtgcgggcgtctctcccccaccgtctcaacatgcttaggggtccggggcccgggctgctgctgctggccgtcctgtgcctggggacagcggtgccctccacgggagcctcgaagagcaagaggcaggctcagcaaatggttcagccccagtccccggtggctgtcagtcaaagcaagcccggttgttatgacaatggaaaacactatcagataaatcaacagtgggagcggacctacctaggcaatgcgttggtttgtacttgttatggaggaagccgaggttttaactgcgagagtaaacctgaagctgaagagacttgctttgacaagtacactgggaacacttaccgagtgggtgacacttatgagcgtcctaaagactccatgatctgggactgtacctgcatcggggctgggcgagggagaataagctgtaccatcgcaaaccgctgccatgaagggggtcagtcctacaagattggtgacacctggaggagaccacatgagactggtggttacatgttagagtgtgtgtgtcttggtaatggaaaaggagaatggacctgcaagcccatagctgagaagtgttttgatcatgctgctgggacttcctatgtggtcggagaaacgtgggagaagccctaccaaggctggatgatggtagattgtacttgcctgggagaaggcagcggacgcatcacttgcacttctagaaatagatgcaacgatcaggacacaaggacatcctatagaattggagacacctggagcaagaaggataatcgaggaaacctgctccagtgcatctgcacaggcaacggccgaggagagtggaagtgtgagaggcacacctctgtgcagaccacatcgagcggatctggccccttcaccgatgttcgtgcagctgtttaccaaccgcagcctcacccccagcctcctccctatggccactgtgtcacagacagtggtgtggtctactctgtggggatgcagtggctgaagacacaaggaaataagcaaatgctttgcacgtgcctgggcaacggagtcagctgccaagagacagctgtaacccagacttacggtggcaactcaaatggagagccatgtgtcttaccattcacctacaatggcaggacgttctactcctgcaccacagaagggcgacaggacggacatctttggtgcagcacaacttcgaattatgagcaggaccagaaatactctttctgcacagaccacactgttttggttcagactcgaggaggaaattccaatggtgccttgtgccacttccccttcctatacaacaaccacaattacactgattgcacttctgagggcagaagagacaacatgaagtggtgtgggaccacacagaactatgatgccgaccagaagtttgggttctgccccatggctgcccacgaggaaatctgcacaaccaatgaaggggtcatgtaccgcattggagatcagtgggataagcagcatgacatgggtcacatgatgaggtgcacgtgtgttgggaatggtcgtggggaatggacatgcattgcctactcgcagcttcgagatcagtgcattgttgatgacatcacttacaatgtgaacgacacattccacaagcgtcatgaagaggggcacatgctgaactgtacatgcttcggtcagggtcggggcaggtggaagtgtgatcccgtcgaccaatgccaggattcagagactgggacgttttatcaaattggagattcatgggagaagtatgtgcatggtgtcagataccagtgctactgctatggccgtggcattggggagtggcattgccaacctttacagacctatccaagctcaagtggtcctgtcgaagtatttatcactgagactccgagtcagcccaactcccaccccatccagtggaatgcaccacagccatctcacatttccaagtacattctcaggtggagacctaaaaattctgtaggccgttggaaggaagctaccataccaggccacttaaactcctacaccatcaaaggcctgaagcctggtgtggtatacgagggccagctcatcagcatccagcagtacggccaccaagaagtgactcgctttgacttcaccaccaccagcaccagcacacctgtgaccagtatgtacacaaccaccctcatgcctcctacccccgaggttcctagagctaggctctcctgaggcaatgctttccttctcaattcatattcttccaggaggggcaccaacgttttttaaaatgatgttggcgacgaggacggtaaattttctagatgactgaaggctgactttcccctttctgtgactctctaggcaacaccgtgacaggagagacgactcccttttctcctcttgtggccacttctgaatctgtgaccgaaatcacagccagtagctttgtggtctcctgggtctcagcttccgacaccgtgtcgggattccgggtggaatatgagctgagtgaggagggagatgagccacagtacctggatcttccaagcacagccacttctgtgaacatccctgacctgcttcctggccgaaaatacattgtaaatgtctatcagatatctgaggatggggagcagagtttgatcctgtctacttcacaaacaacagcgcctgatgccccacctgacccgactgtggaccaagttgatgacacctcaattgttgttcgctggagcagaccccaggctcccatcacagggtacagaatagtctattcgccatcagtagaaggtagcagcacagaactcaaccttcctgaaactgcaaactccgtcaccctcagtgacttgcaacctggtgttcagtataacatcactatctatgctgtggaagaaaatcaagaaagtacacctgttgtcattcaacaagaaaccactggcaccccacgctcagatacagtgccctctcccagggacctgcagtttgtggaagtgacagacgtgaaggtcaccatcatgtggacaccgcctgagagtgcagtgaccggctaccgtgtggatgtgatccccgtcaacctgcctggcgagcacgggcagaggctgcccatcagcaggaacacctttgcagaagtcaccgggctgtcccctggggtcacctattacttcaaagtctttgcagtgagccatgggagggagagcaagcctctgactgctcaacagacaaccaaactggatgctcccactaacctccagtttgtcaatgaaactgattctactgtcctggtgagatggactccacctcgggcccagataacaggataccgactgaccgtgggccttacccgaagaggacagcccaggcagtacaatgtgggtccctctgtctccaagtacccactgaggaatctgcagcctgcatctgagtacaccgtatccctcgtggccataaagggcaaccaagagagccccaaagccactggagtctttaccacactgcagcctgggagctctattccaccttacaacaccgaggtgactgagaccaccattgtgatcacatggacgcctgctccaagaattggttttaagctgggtgtacgaccaagccagggaggagaggcaccacgagaagtgacttcagactcaggaagcatcgttgtgtccggcttgactccaggagtagaatacgtctacaccatccaagtcctgagagatggacaggaaagagatgcgccaattgtaaacaaagtggtgacaccattgtctccaccaacaaacttgcatctggaggcaaaccctgacactggagtgctcacagtctcctgggagaggagcaccaccccagacattactggttatagaattaccacaacccctacaaacggccagcagggaaattctttggaagaagtggtccatgctgatcagagctcctgcacttttgataacctgagtcccggcctggagtacaatgtcagtgtttacactgtcaaggatgacaaggaaagtgtccctatctctgataccatcatcccagctgttcctcctcccactgacctgcgattcaccaacattggtccagacaccatgcgtgtcacctgggctccacccccatccattgatttaaccaacttcctggtgcgttactcacctgtgaaaaatgaggaagatgttgcagagttgtcaatttctccttcagacaatgcagtggtcttaacaaatctcctgcctggtacagaatatgtagtgagtgtctccagtgtctacgaacaacatgagagcacacctcttagaggaagacagaaaacaggtcttgattccccaactggcattgacttttctgatattactgccaactcttttactgtgcactggattgctcctcgagccaccatcactggctacaggatccgccatcatcccgagcacttcagtgggagacctcgagaagatcgggtgccccactctcggaattccatcaccctcaccaacctcactccaggcacagagtatgtggtcagcatcgttgctcttaatggcagagaggaaagtcccttattgattggccaacaatcaacagtttctgatgttccgagggacctggaagttgttgctgcgacccccaccagcctactgatcagctgggatgctcctgctgtcacagtgagatattacaggatcacttacggagaaacaggaggaaatagccctgtccaggagttcactgtgcctgggagcaagtctacagctaccatcagcggccttaaacctggagttgattataccatcactgtgtatgctgtcactggccgtggagacagccccgcaagcagcaagccaatttccattaattaccgaacagaaattgacaaaccatcccagatgcaagtgaccgatgttcaggacaacagcattagtgtcaagtggctgccttcaagttcccctgttactggttacagagtaaccaccactcccaaaaatggaccaggaccaacaaaaactaaaactgcaggtccagatcaaacagaaatgactattgaaggcttgcagcccacagtggagtatgtggttagtgtctatgatggaatccatgagctattccctgcacctgatggtgaagaagacactgcagagctgcaaggcctcagaccgggttctgagtacacagtcagtgtggttgccttgcacgatgatatggagagccagcccctgattggaacccagtccacagctattcctgcaccaactgacctgaagttcactcaggtcacacccacaagcctgagcgcccagtggacaccacccaatgttcagctcactggatatcgagtgcgggtgacccccaaggagaagaccggaccaatgaaagaaatcaaccttgctcctgacagctcatccgtggttgtatcaggacttatggtggccaccaaatatgaagtgagtgtctatgctcttaaggacactttgacaagcagaccagctcagggtgttgtcaccactctggagaatgtcagcccaccaagaagggctcgtgtgacagatgctactgagaccaccatcaccattagctggagaaccaagactgagacgatcactggcttccaagttgatgccgttccagccaatggccagactccaatccagagaaccatcaagccagatgtcagaagctacaccatcacaggtttacaaccaggcactgactacaagatctacctgtacaccttgaatgacaatgctcggagctcccctgtggtcatcgacgcctccactgccattgatgcaccatccaacctgcgtttcctggccaccacacccaattccttgctggtatcatggcagccgccacgtgccaggattaccggctacatcatcaagtatgagaagcctgggtctcctcccagagaagtggtccctcggccccgccctggtgtcacagaggctactattactggcctggaaccgggaaccgaatatacaatttatgtcattgccctgaagaataatcagaagagcgagcccctgattggaaggaaaaagacagttcaaaagacccctttcgtcacccaccctgggtatgacactggaaatggtattcagcttcctggcacttctggtcagcaacccagtgttgggcaacaaatgatctttgaggaacatggttttaggcggaccacaccgcccacaacggccacccccataaggcataggccaagaccatacccgccgaatgtaggacaagaagctctctctcagacaaccatctcatgggccccattccaggacacttctgagtacatcatttcatgtcatcctgttggcactgatgaagaacccttacagttcagggttcctggaacttctaccagtgccactctgacaggcctcaccagaggtgccacctacaacatcatagtggaggcactgaaagaccagcagaggcataaggttcgggaagaggttgttaccgtgggcaactctgtcaacgaaggcttgaaccaacctacggatgactcgtgctttgacccctacacagtttcccattatgccgttggagatgagtgggaacgaatgtctgaatcaggctttaaactgttgtgccagtgcttaggctttggaagtggtcatttcagatgtgattcatctagatggtgccatgacaatggtgtgaactacaagattggagagaagtgggaccgtcagggagaaaatggccagatgatgagctgcacatgtcttgggaacggaaaaggagaattcaagtgtgaccctcatgaggcaacgtgttacgatgatgggaagacataccacgtaggagaacagtggcagaaggaatatctcggtgccatttgctcctgcacatgctttggaggccagcggggctggcgctgtgacaactgccgcagacctgggggtgaacccagtcccgaaggcactactggccagtcctacaaccagtattctcagagataccatcagagaacaaacactaatgttaattgcccaattgagtgcttcatgcctttagatgtacaggctgacagagaagattcccgagagtaaatcatctttccaatccagaggaacaagcatgtctctctgccaagatccatctaaactggagtgatgttagcagacccagcttagagttcttctttctttcttaagccctttgctctggaggaagttctccagcttcagctcaactcacagcttctccaagcatcaccctgggagtttcctgagggttttctcataaatgagggctgcacattgcctgttctgcttcgaagtattcaataccgctcagtattttaaatgaagtgattctaagatttggtttgggatcaataggaaagcatatgcagccaaccaagatgcaaatgttttgaaatgattgtctggcccgcaatactgtaggaacaagcatgatcttgttactgtgatattttaaatatccacagtactcactttttccaaatgatcctagtaattgcctagaaatatctttctcttacctgttatttatcaatttttcccagtatttttatacggaaaaaattgtattgaaaacacttagtatgcagttgataagaggaatttggtataattatggtgggtgattattttttatactgtatgtgccaaagctttactactgtggaaagacaactgttttaataaaagatttacattccacaacttgaagttcatctatttgatataagacaccttcgggggaaataattcctgtgaatattctttttcaattcagcaaacatttgaaaatctatgatgtgcaagtctaattgttgatttcagtacaagattttctaaatcagttgctacaaaaactgattggtttttgtcacttcatctcttcactaatggagatagcttt

SEQ ID NO: 10 - DNA, 8278 bp, Homo sapiens
ggcggggcggggacagcccggcgggtctctcctcccccgcgccccgggcctccagaggggcgggaggggaccgtcccatataagccccggctcccggcgctcggacgcccgcgccggctgtgctgcacagggggaggagagggaaccccaggcgcgagcgggaagaggggacctgcagccacaacttctctggtcctctgcatcccttctgtccctccacccgtccccttccccaccctctggcccccaccttcttggaggcgacaacccccgggaggcattagaagggatttttcccgcaggttgcgaagggaagcaaacttggtggcaacttgcctcccggtgcgggcgtctctcccccaccgtctcaacatgcttaggggtccggggcccgggctgctgctgctggccgtcctgtgcctggggacagcggtgccctccacgggagcctcgaagagcaagaggcaggctcagcaaatggttcagccccagtccccggtggctgtcagtcaaagcaagcccggttgttatgacaatggaaaacactatcagataaatcaacagtgggagcggacctacctaggcaatgcgttggtttgtacttgttatggaggaagccgaggttttaactgcgagagtaaacctgaagctgaagagacttgctttgacaagtacactgggaacacttaccgagtgggtgacacttatgagcgtcctaaagactccatgatctgggactgtacctgcatcggggctgggcgagggagaataagctgtaccatcgcaaaccgctgccatgaagggggtcagtcctacaagattggtgacacctggaggagaccacatgagactggtggttacatgttagagtgtgtgtgtcttggtaatggaaaaggagaatggacctgcaagcccatagctgagaagtgttttgatcatgctgctgggacttcctatgtggtcggagaaacgtgggagaagccctaccaaggctggatgatggtagattgtacttgcctgggagaaggcagcggacgcatcacttgcacttctagaaatagatgcaacgatcaggacacaaggacatcctatagaattggagacacctggagcaagaaggataatcgaggaaacctgctccagtgcatctgcacaggcaacggccgaggagagtggaagtgtgagaggcacacctctgtgcagaccacatcgagcggatctggccccttcaccgatgttcgtgcagctgtttaccaaccgcagcctcacccccagcctcctccctatggccactgtgtcacagacagtggtgtggtctactctgtggggatgcagtggctgaagacacaaggaaataagcaaatgctttgcacgtgcctgggcaacggagtcagctgccaagagacagctgtaacccagacttacggtggcaactcaaatggagagccatgtgtcttaccattcacctacaatggcaggacgttctactcctgcaccacagaagggcgacaggacggacatctttggtgcagcacaacttcgaattatgagcaggaccagaaatactctttctgcacagaccacactgttttggttcagactcgaggaggaaattccaatggtgccttgtgccacttccccttcctatacaacaaccacaattacactgattgcacttctgagggcagaagagacaacatgaagtggtgtgggaccacacagaactatgatgccgaccagaagtttgggttctgccccatggctgcccacgaggaaatctgcacaaccaatgaaggggtcatgtaccgcattggagatcagtgggataagcagcatgacatgggtcacatgatgaggtgcacgtgtgttgggaatggtcgtggggaatggacatgcattgcctactcgcagcttcgagatcagtgcattgttgatgacatcacttacaatgtgaacgacacattccacaagcgtcatgaagaggggcacatgctgaactgtacatgcttcggtcagggtcggggcaggtggaagtgtgatcccgtcgaccaatgccaggattcagagactgggacgttttatcaaattggagattcatgggagaagtatgtgcatggtgtcagataccagtgctactgctatggccgtggcattggggagtggcattgccaacctttacagacctatccaagctcaagtggtcctgtcgaagtatttatcactgagactccgagtcagcccaactcccaccccatccagtggaatgcaccacagccatctcacatttccaagtacattctcaggtggagacctaaaaattctgtaggccgttggaaggaagctaccataccaggccacttaaactcctacaccatcaaaggcctgaagcctggtgtggtatacgagggccagctcatcagcatccagcagtacggccaccaagaagtgactcgctttgacttcaccaccaccagcaccagcacacctgtgaccagcaacaccgtgacaggagagacgactcccttttctcctcttgtggccacttctgaatctgtgaccgaaatcacagccagtagctttgtggtctcctgggtctcagcttccgacaccgtgtcgggattccgggtggaatatgagctgagtgaggagggagatgagccacagtacctggatcttccaagcacagccacttctgtgaacatccctgacctgcttcctggccgaaaatacattgtaaatgtctatcagatatctgaggatggggagcagagtttgatcctgtctacttcacaaacaacagcgcctgatgccccacctgacccgactgtggaccaagttgatgacacctcaattgttgttcgctggagcagaccccaggctcccatcacagggtacagaatagtctattcgccatcagtagaaggtagcagcacagaactcaaccttcctgaaactgcaaactccgtcaccctcagtgacttgcaacctggtgttcagtataacatcactatctatgctgtggaagaaaatcaagaaagtacacctgttgtcattcaacaagaaaccactggcaccccacgctcagatacagtgccctctcccagggacctgcagtttgtggaagtgacagacgtgaaggtcaccatcatgtggacaccgcctgagagtgcagtgaccggctaccgtgtggatgtgatccccgtcaacctgcctggcgagcacgggcagaggctgcccatcagcaggaacacctttgcagaagtcaccgggctgtcccctggggtcacctattacttcaaagtctttgcagtgagccatgggagggagagcaagcctctgactgctcaacagacaaccaaactggatgctcccactaacctccagtttgtcaatgaaactgattctactgtcctggtgagatggactccacctcgggcccagataacaggataccgactgaccgtgggccttacccgaagaggacagcccaggcagtacaatgtgggtccctctgtctccaagtacccactgaggaatctgcagcctgcatctgagtacaccgtatccctcgtggccataaagggcaaccaagagagccccaaagccactggagtctttaccacactgcagcctgggagctctattccaccttacaacaccgaggtgactgagaccaccattgtgatcacatggacgcctgctccaagaattggttttaagctgggtgtacgaccaagccagggaggagaggcaccacgagaagtgacttcagactcaggaagcatcgttgtgtccggcttgactccaggagtagaatacgtctacaccatccaagtcctgagagatggacaggaaagagatgcgccaattgtaaacaaagtggtgacaccattgtctccaccaacaaacttgcatctggaggcaaaccctgacactggagtgctcacagtctcctgggagaggagcaccaccccagacattactggttatagaattaccacaacccctacaaacggccagcagggaaattctttggaagaagtggtccatgctgatcagagctcctgcacttttgataacctgagtcccggcctggagtacaatgtcagtgtttacactgtcaaggatgacaaggaaagtgtccctatctctgataccatcatcccagctgttcctcctcccactgacctgcgattcaccaacattggtccagacaccatgcgtgtcacctgggctccacccccatccattgatttaaccaacttcctggtgcgttactcacctgtgaaaaatgaggaagatgttgcagagttgtcaatttctccttcagacaatgcagtggtcttaacaaatctcctgcctggtacagaatatgtagtgagtgtctccagtgtctacgaacaacatgagagcacacctcttagaggaagacagaaaacaggtcttgattccccaactggcattgacttttctgatattactgccaactcttttactgtgcactggattgctcctcgagccaccatcactggctacaggatccgccatcatcccgagcacttcagtgggagacctcgagaagatcgggtgccccactctcggaattccatcaccctcaccaacctcactccaggcacagagtatgtggtcagcatcgttgctcttaatggcagagaggaaagtcccttattgattggccaacaatcaacagtttctgatgttccgagggacctggaagttgttgctgcgacccccaccagcctactgatcagctgggatgctcctgctgtcacagtgagatattacaggatcacttacggagaaacaggaggaaatagccctgtccaggagttcactgtgcctgggagcaagtctacagctaccatcagcggccttaaacctggagttgattataccatcactgtgtatgctgtcactggccgtggagacagccccgcaagcagcaagccaatttccattaattaccgaacagaaattgacaaaccatcccagatgcaagtgaccgatgttcaggacaacagcattagtgtcaagtggctgccttcaagttcccctgttactggttacagagtaaccaccactcccaaaaatggaccaggaccaacaaaaactaaaactgcaggtccagatcaaacagaaatgactattgaaggcttgcagcccacagtggagtatgtggttagtgtctatgctcagaatccaagcggagagagtcagcctctggttcagactgcagtaaccaacattgatcgccctaaaggactggcattcactgatgtggatgtcgattccatcaaaattgcttgggaaagcccacaggggcaagtttccaggtacagggtgacctactcgagccctgaggatggaatccatgagctattccctgcacctgatggtgaagaagacactgcagagctgcaaggcctcagaccgggttctgagtacacagtcagtgtggttgccttgcacgatgatatggagagccagcccctgattggaacccagtccacagctattcctgcaccaactgacctgaagttcactcaggtcacacccacaagcctgagcgcccagtggacaccacccaatgttcagctcactggatatcgagtgcgggtgacccccaaggagaagaccggaccaatgaaagaaatcaaccttgctcctgacagctcatccgtggttgtatcaggacttatggtggccaccaaatatgaagtgagtgtctatgctcttaaggacactttgacaagcagaccagctcagggtgttgtcaccactctggagaatgtcagcccaccaagaagggctcgtgtgacagatgctactgagaccaccatcaccattagctggagaaccaagactgagacgatcactggcttccaagttgatgccgttccagccaatggccagactccaatccagagaaccatcaagccagatgtcagaagctacaccatcacaggtttacaaccaggcactgactacaagatctacctgtacaccttgaatgacaatgctcggagctcccctgtggtcatcgacgcctccactgccattgatgcaccatccaacctgcgtttcctggccaccacacccaattccttgctggtatcatggcagccgccacgtgccaggattaccggctacatcatcaagtatgagaagcctgggtctcctcccagagaagtggtccctcggccccgccctggtgtcacagaggctactattactggcctggaaccgggaaccgaatatacaatttatgtcattgccctgaagaataatcagaagagcgagcccctgattggaaggaaaaagacagacgagcttccccaactggtaacccttccacaccccaatcttcatggaccagagatcttggatgttccttccacagttcaaaagacccctttcgtcacccaccctgggtatgacactggaaatggtattcagcttcctggcacttctggtcagcaacccagtgttgggcaacaaatgatctttgaggaacatggttttaggcggaccacaccgcccacaacggccacccccataaggcataggccaagaccatacccgccgaatgtaggacaagaagctctctctcagacaaccatctcatgggccccattccaggacacttctgagtacatcatttcatgtcatcctgttggcactgatgaagaacccttacagttcagggttcctggaacttctaccagtgccactctgacaggcctcaccagaggtgccacctacaacatcatagtggaggcactgaaagaccagcagaggcataaggttcgggaagaggttgttaccgtgggcaactctgtcaacgaaggcttgaaccaacctacggatgactcgtgctttgacccctacacagtttcccattatgccgttggagatgagtgggaacgaatgtctgaatcaggctttaaactgttgtgccagtgcttaggctttggaagtggtcatttcagatgtgattcatctagatggtgccatgacaatggtgtgaactacaagattggagagaagtgggaccgtcagggagaaaatggccagatgatgagctgcacatgtcttgggaacggaaaaggagaattcaagtgtgaccctcatgaggcaacgtgttacgatgatgggaagacataccacgtaggagaacagtggcagaaggaatatctcggtgccatttgctcctgcacatgctttggaggccagcggggctggcgctgtgacaactgccgcagacctgggggtgaacccagtcccgaaggcactactggccagtcctacaaccagtattctcagagataccatcagagaacaaacactaatgttaattgcccaattgagtgcttcatgcctttagatgtacaggctgacagagaagattcccgagagtaaatcatctttccaatccagaggaacaagcatgtctctctgccaagatccatctaaactggagtgatgttagcagacccagcttagagttcttctttctttcttaagccctttgctctggaggaagttctccagcttcagctcaactcacagcttctccaagcatcaccctgggagtttcctgagggttttctcataaatgagggctgcacattgcctgttctgcttcgaagtattcaataccgctcagtattttaaatgaagtgattctaagatttggtttgggatcaataggaaagcatatgcagccaaccaagatgcaaatgttttgaaatgattgtctggcccgcaatactgtaggaacaagcatgatcttgttactgtgatattttaaatatccacagtactcactttttccaaatgatcctagtaattgcctagaaatatctttctcttacctgttatttatcaatttttcccagtatttttatacggaaaaaattgtattgaaaacacttagtatgcagttgataagaggaatttggtataattatggtgggtgattattttttatactgtatgtgccaaagctttactactgtggaaagacaactgttttaataaaagatttacattccacaacttgaagttcatctatttgatataagacaccttcgggggaaataattcctgtgaatattctttttcaattcagcaaacatttgaaaatctatgatgtgcaagtctaattgttgatttcagtacaagattttctaaatcagttgctacaaaaactgattggtttttgtcacttcatctcttcactaatggagatagcttt

SEQ ID NO: 11 - DNA, 8332 bp, Homo sapiens
ggcggggcggggacagcccggcgggtctctcctcccccgcgccccgggcctccagaggggcgggaggggaccgtcccatataagccccggctcccggcgctcggacgcccgcgccggctgtgctgcacagggggaggagagggaaccccaggcgcgagcgggaagaggggacctgcagccacaacttctctggtcctctgcatcccttctgtccctccacccgtccccttccccaccctctggcccccaccttcttggaggcgacaacccccgggaggcattagaagggatttttcccgcaggttgcgaagggaagcaaacttggtggcaacttgcctcccggtgcgggcgtctctcccccaccgtctcaacatgcttaggggtccggggcccgggctgctgctgctggccgtcctgtgcctggggacagcggtgccctccacgggagcctcgaagagcaagaggcaggctcagcaaatggttcagccccagtccccggtggctgtcagtcaaagcaagcccggttgttatgacaatggaaaacactatcagataaatcaacagtgggagcggacctacctaggcaatgcgttggtttgtacttgttatggaggaagccgaggttttaactgcgagagtaaacctgaagctgaagagacttgctttgacaagtacactgggaacacttaccgagtgggtgacacttatgagcgtcctaaagactccatgatctgggactgtacctgcatcggggctgggcgagggagaataagctgtaccatcgcaaaccgctgccatgaagggggtcagtcctacaagattggtgacacctggaggagaccacatgagactggtggttacatgttagagtgtgtgtgtcttggtaatggaaaaggagaatggacctgcaagcccatagctgagaagtgttttgatcatgctgctgggacttcctatgtggtcggagaaacgtgggagaagccctaccaaggctggatgatggtagattgtacttgcctgggagaaggcagcggacgcatcacttgcacttctagaaatagatgcaacgatcaggacacaaggacatcctatagaattggagacacctggagcaagaaggataatcgaggaaacctgctccagtgcatctgcacaggcaacggccgaggagagtggaagtgtgagaggcacacctctgtgcagaccacatcgagcggatctggccccttcaccgatgttcgtgcagctgtttaccaaccgcagcctcacccccagcctcctccctatggccactgtgtcacagacagtggtgtggtctactctgtggggatgcagtggctgaagacacaaggaaataagcaaatgctttgcacgtgcctgggcaacggagtcagctgccaagagacagctgtaacccagacttacggtggcaactcaaatggagagccatgtgtcttaccattcacctacaatggcaggacgttctactcctgcaccacagaagggcgacaggacggacatctttggtgcagcacaacttcgaattatgagcaggaccagaaatactctttctgcacagaccacactgttttggttcagactcgaggaggaaattccaatggtgccttgtgccacttccccttcctatacaacaaccacaattacactgattgcacttctgagggcagaagagacaacatgaagtggtgtgggaccacacagaactatgatgccgaccagaagtttgggttctgccccatggctgcccacgaggaaatctgcacaaccaatgaaggggtcatgtaccgcattggagatcagtgggataagcagcatgacatgggtcacatgatgaggtgcacgtgtgttgggaatggtcgtggggaatggacatgcattgcctactcgcagcttcgagatcagtgcattgttgatgacatcacttacaatgtgaacgacacattccacaagcgtcatgaagaggggcacatgctgaactgtacatgcttcggtcagggtcggggcaggtggaagtgtgatcccgtcgaccaatgccaggattcagagactgggacgttttatcaaattggagattcatgggagaagtatgtgcatggtgtcagataccagtgctactgctatggccgtggcattggggagtggcattgccaacctttacagacctatccaagctcaagtggtcctgtcgaagtatttatcactgagactccgagtcagcccaactcccaccccatccagtggaatgcaccacagccatctcacatttccaagtacattctcaggtggagacctaaaaattctgtaggccgttggaaggaagctaccataccaggccacttaaactcctacaccatcaaaggcctgaagcctggtgtggtatacgagggccagctcatcagcatccagcagtacggccaccaagaagtgactcgctttgacttcaccaccaccagcaccagcacacctgtgaccagcaacaccgtgacaggagagacgactcccttttctcctcttgtggccacttctgaatctgtgaccgaaatcacagccagtagctttgtggtctcctgggtctcagcttccgacaccgtgtcgggattccgggtggaatatgagctgagtgaggagggagatgagccacagtacctggatcttccaagcacagccacttctgtgaacatccctgacctgcttcctggccgaaaatacattgtaaatgtctatcagatatctgaggatggggagcagagtttgatcctgtctacttcacaaacaacagcgcctgatgccccacctgacccgactgtggaccaagttgatgacacctcaattgttgttcgctggagcagaccccaggctcccatcacagggtacagaatagtctattcgccatcagtagaaggtagcagcacagaactcaaccttcctgaaactgcaaactccgtcaccctcagtgacttgcaacctggtgttcagtataacatcactatctatgctgtggaagaaaatcaagaaagtacacctgttgtcattcaacaagaaaccactggcaccccacgctcagatacagtgccctctcccagggacctgcagtttgtggaagtgacagacgtgaaggtcaccatcatgtggacaccgcctgagagtgcagtgaccggctaccgtgtggatgtgatccccgtcaacctgcctggcgagcacgggcagaggctgcccatcagcaggaacacctttgcagaagtcaccgggctgtcccctggggtcacctattacttcaaagtctttgcagtgagccatgggagggagagcaagcctctgactgctcaacagacaaccaaactggatgctcccactaacctccagtttgtcaatgaaactgattctactgtcctggtgagatggactccacctcgggcccagataacaggataccgactgaccgtgggccttacccgaagaggacagcccaggcagtacaatgtgggtccctctgtctccaagtacccactgaggaatctgcagcctgcatctgagtacaccgtatccctcgtggccataaagggcaaccaagagagccccaaagccactggagtctttaccacactgcagcctgggagctctattccaccttacaacaccgaggtgactgagaccaccattgtgatcacatggacgcctgctccaagaattggttttaagctgggtgtacgaccaagccagggaggagaggcaccacgagaagtgacttcagactcaggaagcatcgttgtgtccggcttgactccaggagtagaatacgtctacaccatccaagtcctgagagatggacaggaaagagatgcgccaattgtaaacaaagtggtgacaccattgtctccaccaacaaacttgcatctggaggcaaaccctgacactggagtgctcacagtctcctgggagaggagcaccaccccagacattactggttatagaattaccacaacccctacaaacggccagcagggaaattctttggaagaagtggtccatgctgatcagagctcctgcacttttgataacctgagtcccggcctggagtacaatgtcagtgtttacactgtcaaggatgacaaggaaagtgtccctatctctgataccatcatcccagctgttcctcctcccactgacctgcgattcaccaacattggtccagacaccatgcgtgtcacctgggctccacccccatccattgatttaaccaacttcctggtgcgttactcacctgtgaaaaatgaggaagatgttgcagagttgtcaatttctccttcagacaatgcagtggtcttaacaaatctcctgcctggtacagaatatgtagtgagtgtctccagtgtctacgaacaacatgagagcacacctcttagaggaagacagaaaacaggtcttgattccccaactggcattgacttttctgatattactgccaactcttttactgtgcactggattgctcctcgagccaccatcactggctacaggatccgccatcatcccgagcacttcagtgggagacctcgagaagatcgggtgccccactctcggaattccatcaccctcaccaacctcactccaggcacagagtatgtggtcagcatcgttgctcttaatggcagagaggaaagtcccttattgattggccaacaatcaacagtttctgatgttccgagggacctggaagttgttgctgcgacccccaccagcctactgatcagctgggatgctcctgctgtcacagtgagatattacaggatcacttacggagaaacaggaggaaatagccctgtccaggagttcactgtgcctgggagcaagtctacagctaccatcagcggccttaaacctggagttgattataccatcactgtgtatgctgtcactggccgtggagacagccccgcaagcagcaagccaatttccattaattaccgaacagaaattgacaaaccatcccagatgcaagtgaccgatgttcaggacaacagcattagtgtcaagtggctgccttcaagttcccctgttactggttacagagtaaccaccactcccaaaaatggaccaggaccaacaaaaactaaaactgcaggtccagatcaaacagaaatgactattgaaggcttgcagcccacagtggagtatgtggttagtgtctatgctcagaatccaagcggagagagtcagcctctggttcagactgcagtaaccaacattgatcgccctaaaggactggcattcactgatgtggatgtcgattccatcaaaattgcttgggaaagcccacaggggcaagtttccaggtacagggtgacctactcgagccctgaggatggaatccatgagctattccctgcacctgatggtgaagaagacactgcagagctgcaaggcctcagaccgggttctgagtacacagtcagtgtggttgccttgcacgatgatatggagagccagcccctgattggaacccagtccacagctattcctgcaccaactgacctgaagttcactcaggtcacacccacaagcctgagcgcccagtggacaccacccaatgttcagctcactggatatcgagtgcgggtgacccccaaggagaagaccggaccaatgaaagaaatcaaccttgctcctgacagctcatccgtggttgtatcaggacttatggtggccaccaaatatgaagtgagtgtctatgctcttaaggacactttgacaagcagaccagctcagggtgttgtcaccactctggagaatgtcagcccaccaagaagggctcgtgtgacagatgctactgagaccaccatcaccattagctggagaaccaagactgagacgatcactggcttccaagttgatgccgttccagccaatggccagactccaatccagagaaccatcaagccagatgtcagaagctacaccatcacaggtttacaaccaggcactgactacaagatctacctgtacaccttgaatgacaatgctcggagctcccctgtggtcatcgacgcctccactgccattgatgcaccatccaacctgcgtttcctggccaccacacccaattccttgctggtatcatggcagccgccacgtgccaggattaccggctacatcatcaagtatgagaagcctgggtctcctcccagagaagtggtccctcggccccgccctggtgtcacagaggctactattactggcctggaaccgggaaccgaatatacaatttatgtcattgccctgaagaataatcagaagagcgagcccctgattggaaggaaaaagacagacgagcttccccaactggtaacccttccacaccccaatcttcatggaccagagatcttggatgttccttccacagttcaaaagacccctttcgtcacccaccctgggtatgacactggaaatggtattcagcttcctggcacttctggtcagcaacccagtgttgggcaacaaatgatctttgaggaacatggttttaggcggaccacaccgcccacaacggccacccccataaggcataggccaagaccatacccgccgaatgtaggacaagaagctctctctcagacaaccatctcatgggccccattccaggacacttctgagtacatcatttcatgtcatcctgttggcactgatgaagaacccttacagttcagggttcctggaacttctaccagtgccactctgacaggcctcaccagaggtgccacctacaacatcatagtggaggcactgaaagaccagcagaggcataaggttcgggaagaggttgttaccgtgggcaactctgtcaacgaaggcttgaaccaacctacggatgactcgtgctttgacccctacacagtttcccattatgccgttggagatgagtgggaacgaatgtctgaatcaggctttaaactgttgtgccagtgcttaggctttggaagtggtcatttcagatgtgattcatctagatggtgccatgacaatggtgtgaactacaagattggagagaagtgggaccgtcagggagaaaatggccagatgatgagctgcacatgtcttgggaacggaaaaggagaattcaagtgtgaccctcatgaggcaacgtgttacgatgatgggaagacataccacgtaggagaacagtggcagaaggaatatctcggtgccatttgctcctgcacatgctttggaggccagcggggctggcgctgtgacaactgccgcagacctgggggtgaacccagtcccgaaggcactactggccagtcctacaaccagtattctcagagataccatcagagaacaaacactaatgttaattgcccaattgagtgcttcatgcctttagatgtacaggctgacagagaagattcccgagagtaaatcatctttccaatccagaggaacaagcatgtctctctgccaagatccatctaaactggagtgatgttagcagacccagcttagagttcttctttctttcttaagccctttgctctggaggaagttctccagcttcagctcaactcacagcttctccaagcatcaccctgggagtttcctgagggttttctcataaatgagggctgcacattgcctgttctgcttcgaagtattcaataccgctcagtattttaaatgaagtgattctaagatttggtttgggatcaataggaaagcatatgcagccaaccaagatgcaaatgttttgaaatgatatgaccaaaattttaagtaggaaagtcacccaaacacttctgctttcacttaagtgtctggcccgcaatactgtaggaacaagcatgatcttgttactgtgatattttaaatatccacagtactcactttttccaaatgatcctagtaattgcctagaaatatctttctcttacctgttatttatcaatttttcccagtatttttatacggaaaaaattgtattgaaaacacttagtatgcagttgataagaggaatttggtataattatggtgggtgattattttttatactgtatgtgccaaagctttactactgtggaaagacaactgttttaataaaagatttacattccacaacttgaagttcatctatttgatataagacaccttcgggggaaataattcctgtgaatattctttttcaattcagcaaacatttgaaaatctatgatgtgcaagtctaattgttgatttcagtacaagattttctaaatcagttgctacaaaaactgattggtttttgtcacttcatctcttcactaatggagatagcttt

SEQ ID NO: 12 - DNA, 7848 bp, Homo sapiens
ggcggggcggggacagcccggcgggtctctcctcccccgcgccccgggcctccagaggggcgggaggggaccgtcccatataagccccggctcccggcgctcggacgcccgcgccggctgtgctgcacagggggaggagagggaaccccaggcgcgagcgggaagaggggacctgcagccacaacttctctggtcctctgcatcccttctgtccctccacccgtccccttccccaccctctggcccccaccttcttggaggcgacaacccccgggaggcattagaagggatttttcccgcaggttgcgaagggaagcaaacttggtggcaacttgcctcccggtgcgggcgtctctcccccaccgtctcaacatgcttaggggtccggggcccgggctgctgctgctggccgtcctgtgcctggggacagcggtgccctccacgggagcctcgaagagcaagaggcaggctcagcaaatggttcagccccagtccccggtggctgtcagtcaaagcaagcccggttgttatgacaatggaaaacactatcagataaatcaacagtgggagcggacctacctaggcaatgcgttggtttgtacttgttatggaggaagccgaggttttaactgcgagagtaaacctgaagctgaagagacttgctttgacaagtacactgggaacacttaccgagtgggtgacacttatgagcgtcctaaagactccatgatctgggactgtacctgcatcggggctgggcgagggagaataagctgtaccatcgcaaaccgctgccatgaagggggtcagtcctacaagattggtgacacctggaggagaccacatgagactggtggttacatgttagagtgtgtgtgtcttggtaatggaaaaggagaatggacctgcaagcccatagctgagaagtgttttgatcatgctgctgggacttcctatgtggtcggagaaacgtgggagaagccctaccaaggctggatgatggtagattgtacttgcctgggagaaggcagcggacgcatcacttgcacttctagaaatagatgcaacgatcaggacacaaggacatcctatagaattggagacacctggagcaagaaggataatcgaggaaacctgctccagtgcatctgcacaggcaacggccgaggagagtggaagtgtgagaggcacacctctgtgcagaccacatcgagcggatctggccccttcaccgatgttcgtgcagctgtttaccaaccgcagcctcacccccagcctcctccctatggccactgtgtcacagacagtggtgtggtctactctgtggggatgcagtggctgaagacacaaggaaataagcaaatgctttgcacgtgcctgggcaacggagtcagctgccaagagacagctgtaacccagacttacggtggcaactcaaatggagagccatgtgtcttaccattcacctacaatggcaggacgttctactcctgcaccacagaagggcgacaggacggacatctttggtgcagcacaacttcgaattatgagcaggaccagaaatactctttctgcacagaccacactgttttggttcagactcgaggaggaaattccaatggtgccttgtgccacttccccttcctatacaacaaccacaattacactgattgcacttctgagggcagaagagacaacatgaagtggtgtgggaccacacagaactatgatgccgaccagaagtttgggttctgccccatggctgcccacgaggaaatctgcacaaccaatgaaggggtcatgtaccgcattggagatcagtgggataagcagcatgacatgggtcacatgatgaggtgcacgtgtgttgggaatggtcgtggggaatggacatgcattgcctactcgcagcttcgagatcagtgcattgttgatgacatcacttacaatgtgaacgacacattccacaagcgtcatgaagaggggcacatgctgaactgtacatgcttcggtcagggtcggggcaggtggaagtgtgatcccgtcgaccaatgccaggattcagagactgggacgttttatcaaattggagattcatgggagaagtatgtgcatggtgtcagataccagtgctactgctatggccgtggcattggggagtggcattgccaacctttacagacctatccaagctcaagtggtcctgtcgaagtatttatcactgagactccgagtcagcccaactcccaccccatccagtggaatgcaccacagccatctcacatttccaagtacattctcaggtggagacctaaaaattctgtaggccgttggaaggaagctaccataccaggccacttaaactcctacaccatcaaaggcctgaagcctggtgtggtatacgagggccagctcatcagcatccagcagtacggccaccaagaagtgactcgctttgacttcaccaccaccagcaccagcacacctgtgaccagcaacaccgtgacaggagagacgactcccttttctcctcttgtggccacttctgaatctgtgaccgaaatcacagccagtagctttgtggtctcctgggtctcagcttccgacaccgtgtcgggattccgggtggaatatgagctgagtgaggagggagatgagccacagtacctggatcttccaagcacagccacttctgtgaacatccctgacctgcttcctggccgaaaatacattgtaaatgtctatcagatatctgaggatggggagcagagtttgatcctgtctacttcacaaacaacagcgcctgatgccccacctgacccgactgtggaccaagttgatgacacctcaattgttgttcgctggagcagaccccaggctcccatcacaggtcagctaaaatagtctattcgccatcagtagaaggtagcagcacagaactcaaccttcctgaaactgcaaactccgtcaccctcagtgacttgcaacctggtgttcagtataacatcactatctatgctgtggaagaaaatcaagaaagtacacctgttgtcattcaacaagaaaccactggcaccccacgctcagatacagtgccctctcccagggacctgcagtttgtggaagtgacagacgtgaaggtcaccatcatgtggacaccgcctgagagtgcagtgaccggctaccgtgtggatgtgatccccgtcaacctgcctggcgagcacgggcagaggctgcccatcagcaggaacacctttgcagaagtcaccgggctgtcccctggggtcacctattacttcaaagtctttgcagtgagccatgggagggagagcaagcctctgactgctcaacagacaaccaaactggatgctcccactaacctccagtttgtcaatgaaactgattctactgtcctggtgagatggactccacctcgggcccagataacaggataccgactgaccgtgggccttacccgaagaggacagcccaggcagtacaatgtgggtccctctgtctccaagtacccactgaggaatctgcagcctgcatctgagtacaccgtatccctcgtggccataaagggcaaccaagagagccccaaagccactggagtctttaccacactgcagcctgggagctctattccaccttacaacaccgaggtgactgagaccaccattgtgatcacatggacgcctgctccaagaattggttttaagctgggtgtacgaccaagccagggaggagaggcaccacgagaagtgacttcagactcaggaagcatcgttgtgtccggcttgactccaggagtagaatacgtctacaccatccaagtcctgagagatggacaggaaagagatgcgccaattgtaaacaaagtggtgacaccattgtctccaccaacaaacttgcatctggaggcaaaccctgacactggagtgctcacagtctcctgggagaggagcaccaccccagacattactggttatagaattaccacaacccctacaaacggccagcagggaaattctttggaagaagtggtccatgctgatcagagctcctgcacttttgataacctgagtcccggcctggagtacaatgtcagtgtttacactgtcaaggatgacaaggaaagtgtccctatctctgataccatcatcccagctgttcctcctcccactgacctgcgattcaccaacattggtccagacaccatgcgtgtcacctgggctccacccccatccattgatttaaccaacttcctggtgcgttactcacctgtgaaaaatgaggaagatgttgcagagttgtcaatttctccttcagacaatgcagtggtcttaacaaatctcctgcctggtacagaatatgtagtgagtgtctccagtgtctacgaacaacatgagagcacacctcttagaggaagacagaaaacaggtcttgattccccaactggcattgacttttctgatattactgccaactcttttactgtgcactggattgctcctcgagccaccatcactggctacaggatccgccatcatcccgagcacttcagtgggagacctcgagaagatcgggtgccccactctcggaattccatcaccctcaccaacctcactccaggcacagagtatgtggtcagcatcgttgctcttaatggcagagaggaaagtcccttattgattggccaacaatcaacagtttctgatgttccgagggacctggaagttgttgctgcgacccccaccagcctactgatcagctgggatgctcctgctgtcacagtgagatattacaggatcacttacggagaaacaggaggaaatagccctgtccaggagttcactgtgcctgggagcaagtctacagctaccatcagcggccttaaacctggagttgattataccatcactgtgtatgctgtcactggccgtggagacagccccgcaagcagcaagccaatttccattaattaccgaacagaaattgacaaaccatcccagatgcaagtgaccgatgttcaggacaacagcattagtgtcaagtggctgccttcaagttcccctgttactggttacagagtaaccaccactcccaaaaatggaccaggaccaacaaaaactaaaactgcaggtccagatcaaacagaaatgactattgaaggcttgcagcccacagtggagtatgtggttagtgtctatgctcagaatccaagcggagagagtcagcctctggttcagactgcagtaaccaacattgatcgccctaaaggactggcattcactgatgtggatgtcgattccatcaaaattgcttgggaaagcccacaggggcaagtttccaggtacagggtgacctactcgagccctgaggatggaatccatgagctattccctgcacctgatggtgaagaagacactgcagagctgcaaggcctcagaccgggttctgagtacacagtcagtgtggttgccttgcacgatgatatggagagccagcccctgattggaacccagtccacagctattcctgcaccaactgacctgaagttcactcaggtcacacccacaagcctgagcgcccagtggacaccacccaatgttcagctcactggatatcgagtgcgggtgacccccaaggagaagaccggaccaatgaaagaaatcaaccttgctcctgacagctcatccgtggttgtatcaggacttatggtggccaccaaatatgaagtgagtgtctatgctcttaaggacactttgacaagcagaccagctcagggtgttgtcaccactctggagaatgtcagcccaccaagaagggctcgtgtgacagatgctactgagaccaccatcaccattagctggagaaccaagactgagacgatcactggcttccaagttgatgccgttccagccaatggccagactccaatccagagaaccatcaagccagatgtcagaagctacaccatcacaggtttacaaccaggcactgactacaagatctacctgtacaccttgaatgacaatgctcggagctcccctgtggtcatcgacgcctccactgccattgatgcaccatccaacctgcgtttcctggccaccacacccaattccttgctggtatcatggcagccgccacgtgccaggattaccggctacatcatcaagtatgagaagcctgggtctcctcccagagaagtggtccctcggccccgccctggtgtcacagaggctactattactggcctggaaccgggaaccgaatatacaatttatgtcattgccctgaagaataatcagaagagcgagcccctgattggaaggaaaaagacaggacaagaagctctctctcagacaaccatctcatgggccccattccaggacacttctgagtacatcatttcatgtcatcctgttggcactgatgaagaacccttacagttcagggttcctggaacttctaccagtgccactctgacaggcctcaccagaggtgccacctacaacatcatagtggaggcactgaaagaccagcagaggcataaggttcgggaagaggttgttaccgtgggcaactctggatggtgccatgacaatggtgtgaactacaagattggagagaagtgggaccgtcagggagaaaatggccagatgatgagctgcacatgtcttgggaacggaaaaggagaattcaagtgtgaccctcatgaggcaacgtgttacgatgatgggaagacataccacgtaggagaacagtggcagaaggaatatctcggtgccatttgctcctgcacatgctttggaggccagcggggctggcgctgtgacaactgccgcagacctgggggtgaacccagtcccgaaggcactactggccagtcctacaaccagtattctcagagataccatcagagaacaaacactaatgttaattgcccaattgagtgcttcatgcctttagatgtacaggctgacagagaagattcccgagagtaaatcatctttccaatccagaggaacaagcatgtctctctgccaagatccatctaaactggagtgatgttagcagacccagcttagagttcttctttctttcttaagccctttgctctggaggaagttctccagcttcagctcaactcacagcttctccaagcatcaccctgggagtttcctgagggttttctcataaatgagggctgcacattgcctgttctgcttcgaagtattcaataccgctcagtattttaaatgaagtgattctaagatttggtttgggatcaataggaaagcatatgcagccaaccaagatgcaaatgttttgaaatgattgtctggcccgcaatactgtaggaacaagcatgatcttgttactgtgatattttaaatatccacagtactcactttttccaaatgatcctagtaattgcctagaaatatctttctcttacctgttatttatcaatttttcccagtatttttatacggaaaaaattgtattgaaaacacttagtatgcagttgataagaggaatttggtataattatggtgggtgattattttttatactgtatgtgccaaagctttactactgtggaaagacaactgttttaataaaagatttacattccacaacttgaagttcatctatttgatataagacaccttcgggggaaataattcctgtgaatattctttttcaattcagcaaacatttgaaaatctatgatgtgcaagtctaattgttgatttcagtacaagattttctaaatcagttgctacaaaaactgattggtttttgtcacttcatctcttcactaatggagatagcttt

SEQ ID NO: 13 - DNA, 3160 bp, Homo sapiens
agtcccggcctggagtacaatgtcagtgtttacactgtcaaggatgacaaggaaagaggaaatagccctgtccaggagttcactgtgcctgggagcaagtctacagctaccatcagcggccttaaacctggagttgattataccatcactgtgtatgctgtcactggccgtggagacagccccgcaagcagcaagccaatttccattaattaccgaacagaaattgacaaaccatcccagatgcaagtgaccgatgttcaggacaacagcattagtgtcaagtggctgccttcaagttcccctgttactggttacagagtaaccaccactcccaaaaatggaccaggaccaacaaaaactaaaactgcaggtccagatcaaacagaaatgactattgaaggcttgcagcccacagtggagtatgtggttagtgtctatgctcagaatccaagcggagagagtcagcctctggttcagactgcagtaaccactattcctgcaccaactgacctgaagttcactcaggtcacacccacaagcctgagcgcccagtggacaccacccaatgttcagctcactggatatcgagtgcgggtgacccccaaggagaagaccggaccaatgaaagaaatcaaccttgctcctgacagctcatccgtggttgtatcaggacttatggtggccaccaaatatgaagtgagtgtctatgctcttaaggacactttgacaagcagaccagctcagggtgttgtcaccactctggagaatgtcagcccaccaagaagggctcgtgtgacagatgctactgagaccaccatcaccattagctggagaaccaagactgagacgatcactggcttccaagttgatgccgttccagccaatggccagactccaatccagagaaccatcaagccagatgtcagaagctacaccatcacaggtttacaaccaggcactgactacaagatctacctgtacaccttgaatgacaatgctcggagctcccctgtggtcatcgacgcctccactgccattgatgcaccatccaacctgcgtttcctggccaccacacccaattccttgctggtatcatggcagccgccacgtgccaggattaccggctacatcatcaagtatgagaagcctgggtctcctcccagagaagtggtccctcggccccgccctggtgtcacagaggctactattactggcctggaaccgggaaccgaatatacaatttatgtcattgccctgaagaataatcagaagagcgagcccctgattggaaggaaaaagacagttcaaaagacccctttcgtcacccaccctgggtatgacactggaaatggtattcagcttcctggcacttctggtcagcaacccagtgttgggcaacaaatgatctttgaggaacatggttttaggcggaccacaccgcccacaacggccacccccataaggcataggccaagaccatacccgccgaatgtaggacaagaagctctctctcagacaaccatctcatgggccccattccaggacacttctgagtacatcatttcatgtcatcctgttggcactgatgaagaacccttacagttcagggttcctggaacttctaccagtgccactctgacaggcctcaccagaggtgccacctacaacatcatagtggaggcactgaaagaccagcagaggcataaggttcgggaagaggttgttaccgtgggcaactctgtcaacgaaggcttgaaccaacctacggatgactcgtgctttgacccctacacagtttcccattatgccgttggagatgagtgggaacgaatgtctgaatcaggctttaaactgttgtgccagtgcttaggctttggaagtggtcatttcagatgtgattcatctagatggtgccatgacaatggtgtgaactacaagattggagagaagtgggaccgtcagggagaaaatggccagatgatgagctgcacatgtcttgggaacggaaaaggagaattcaagtgtgaccctcatgaggcaacgtgttacgatgatgggaagacataccacgtaggagaacagtggcagaaggaatatctcggtgccatttgctcctgcacatgctttggaggccagcggggctggcgctgtgacaactgccgcagacctgggggtgaacccagtcccgaaggcactactggccagtcctacaaccagtattctcagagataccatcagagaacaaacactaatgttaattgcccaattgagtgcttcatgcctttagatgtacaggctgacagagaagattcccgagagtaaatcatctttccaatccagaggaacaagcatgtctctctgccaagatccatctaaactggagtgatgttagcagacccagcttagagttcttctttctttcttaagccctttgctctggaggaagttctccagcttcagctcaactcacagcttctccaagcatcaccctgggagtttcctgagggttttctcataaatgagggctgcacattgcctgttctgcttcgaagtattcaataccgctcagtattttaaatgaagtgattctaagatttggtttgggatcaataggaaagcatatgcagccaaccaagatgcaaatgttttgaaatgattgtctggcccgcaatactgtaggaacaagcatgatcttgttactgtgatattttaaatatccacagtactcactttttccaaatgatcctagtaattgcctagaaatatctttctcttacctgttatttatcaatttttcccagtatttttatacggaaaaaattgtattgaaaacacttagtatgcagttgataagaggaatttggtataattatggtgggtgattattttttatactgtatgtgccaaagctttactactgtggaaagacaactgttttaataaaagatttacattccacaacttgaagttcatctatttgatataagacaccttcgggggaaataattcctgtgaatattctttttcaattcagcaaacatttgaaaatctatgatgtgcaagtctaattgttgatttcagtacaagattttctaaatcagttgctacaaaaactgattggtttttgtcacttcatctcttcactaatggagatagcttt

SEQ ID NO: 14 - DNA, 8013 bp, Homo sapiens
ggcggggcggggacagcccggcgggtctctcctcccccgcgccccgggcctccagaggggcgggaggggaccgtcccatataagccccggctcccggcgctcggacgcccgcgccggctgtgctgcacagggggaggagagggaaccccaggcgcgagcgggaagaggggacctgcagccacaacttctctggtcctctgcatcccttctgtccctccacccgtccccttccccaccctctggcccccaccttcttggaggcgacaacccccgggaggcattagaagggatttttcccgcaggttgcgaagggaagcaaacttggtggcaacttgcctcccggtgcgggcgtctctcccccaccgtctcaacatgcttaggggtccggggcccgggctgctgctgctggccgtcctgtgcctggggacagcggtgccctccacgggagcctcgaagagcaagaggcaggctcagcaaatggttcagccccagtccccggtggctgtcagtcaaagcaagcccggttgttatgacaatggaaaacactatcagataaatcaacagtgggagcggacctacctaggcaatgcgttggtttgtacttgttatggaggaagccgaggttttaactgcgagagtaaacctgaagctgaagagacttgctttgacaagtacactgggaacacttaccgagtgggtgacacttatgagcgtcctaaagactccatgatctgggactgtacctgcatcggggctgggcgagggagaataagctgtaccatcgcaaaccgctgccatgaagggggtcagtcctacaagattggtgacacctggaggagaccacatgagactggtggttacatgttagagtgtgtgtgtcttggtaatggaaaaggagaatggacctgcaagcccatagctgagaagtgttttgatcatgctgctgggacttcctatgtggtcggagaaacgtgggagaagccctaccaaggctggatgatggtagattgtacttgcctgggagaaggcagcggacgcatcacttgcacttctagaaatagatgcaacgatcaggacacaaggacatcctatagaattggagacacctggagcaagaaggataatcgaggaaacctgctccagtgcatctgcacaggcaacggccgaggagagtggaagtgtgagaggcacacctctgtgcagaccacatcgagcggatctggccccttcaccgatgttcgtgcagctgtttaccaaccgcagcctcacccccagcctcctccctatggccactgtgtcacagacagtggtgtggtctactctgtggggatgcagtggctgaagacacaaggaaataagcaaatgctttgcacgtgcctgggcaacggagtcagctgccaagagacagctgtaacccagacttacggtggcaactcaaatggagagccatgtgtcttaccattcacctacaatggcaggacgttctactcctgcaccacagaagggcgacaggacggacatctttggtgcagcacaacttcgaattatgagcaggaccagaaatactctttctgcacagaccacactgttttggttcagactcgaggaggaaattccaatggtgccttgtgccacttccccttcctatacaacaaccacaattacactgattgcacttctgagggcagaagagacaacatgaagtggtgtgggaccacacagaactatgatgccgaccagaagtttgggttctgccccatggctgcccacgaggaaatctgcacaaccaatgaaggggtcatgtaccgcattggagatcagtgggataagcagcatgacatgggtcacatgatgaggtgcacgtgtgttgggaatggtcgtggggaatggacatgcattgcctactcgcagcttcgagatcagtgcattgttgatgacatcacttacaatgtgaacgacacattccacaagcgtcatgaagaggggcacatgctgaactgtacatgcttcggtcagggtcggggcaggtggaagtgtgatcccgtcgaccaatgccaggattcagagactgggacgttttatcaaattggagattcatgggagaagtatgtgcatggtgtcagataccagtgctactgctatggccgtggcattggggagtggcattgccaacctttacagacctatccaagctcaagtggtcctgtcgaagtatttatcactgagactccgagtcagcccaactcccaccccatccagtggaatgcaccacagccatctcacatttccaagtacattctcaggtggagacctaaaaattctgtaggccgttggaaggaagctaccataccaggccacttaaactcctacaccatcaaaggcctgaagcctggtgtggtatacgagggccagctcatcagcatccagcagtacggccaccaagaagtgactcgctttgacttcaccaccaccagcaccagcacacctgtgaccagcaacaccgtgacaggagagacgactcccttttctcctcttgtggccacttctgaatctgtgaccgaaatcacagccagtagctttgtggtctcctgggtctcagcttccgacaccgtgtcgggattccgggtggaatatgagctgagtgaggagggagatgagccacagtacctggatcttccaagcacagccacttctgtgaacatccctgacctgcttcctggccgaaaatacattgtaaatgtctatcagatatctgaggatggggagcagagtttgatcctgtctacttcacaaacaacagcgcctgatgccccacctgacccgactgtggaccaagttgatgacacctcaattgttgttcgctggagcagaccccaggctcccatcacaggtcagctaaaatagtctattcgccatcagtagaaggtagcagcacagaactcaaccttcctgaaactgcaaactccgtcaccctcagtgacttgcaacctggtgttcagtataacatcactatctatgctgtggaagaaaatcaagaaagtacacctgttgtcattcaacaagaaaccactggcaccccacgctcagatacagtgccctctcccagggacctgcagtttgtggaagtgacagacgtgaaggtcaccatcatgtggacaccgcctgagagtgcagtgaccggctaccgtgtggatgtgatccccgtcaacctgcctggcgagcacgggcagaggctgcccatcagcaggaacacctttgcagaagtcaccgggctgtcccctggggtcacctattacttcaaagtctttgcagtgagccatgggagggagagcaagcctctgactgctcaacagacaaccaaactggatgctcccactaacctccagtttgtcaatgaaactgattctactgtcctggtgagatggactccacctcgggcccagataacaggataccgactgaccgtgggccttacccgaagaggacagcccaggcagtacaatgtgggtccctctgtctccaagtacccactgaggaatctgcagcctgcatctgagtacaccgtatccctcgtggccataaagggcaaccaagagagccccaaagccactggagtctttaccacactgcagcctgggagctctattccaccttacaacaccgaggtgactgagaccaccattgtgatcacatggacgcctgctccaagaattggttttaagctgggtgtacgaccaagccagggaggagaggcaccacgagaagtgacttcagactcaggaagcatcgttgtgtccggcttgactccaggagtagaatacgtctacaccatccaagtcctgagagatggacaggaaagagatgcgccaattgtaaacaaagtggtgacaccattgtctccaccaacaaacttgcatctggaggcaaaccctgacactggagtgctcacagtctcctgggagaggagcaccaccccagacattactggttatagaattaccacaacccctacaaacggccagcagggaaattctttggaagaagtggtccatgctgatcagagctcctgcacttttgataacctgagtcccggcctggagtacaatgtcagtgtttacactgtcaaggatgacaaggaaagtgtccctatctctgataccatcatcccagctgttcctcctcccactgacctgcgattcaccaacattggtccagacaccatgcgtgtcacctgggctccacccccatccattgatttaaccaacttcctggtgcgttactcacctgtgaaaaatgaggaagatgttgcagagttgtcaatttctccttcagacaatgcagtggtcttaacaaatctcctgcctggtacagaatatgtagtgagtgtctccagtgtctacgaacaacatgagagcacacctcttagaggaagacagaaaacaggtcttgattccccaactggcattgacttttctgatattactgccaactcttttactgtgcactggattgctcctcgagccaccatcactggctacaggatccgccatcatcccgagcacttcagtgggagacctcgagaagatcgggtgccccactctcggaattccatcaccctcaccaacctcactccaggcacagagtatgtggtcagcatcgttgctcttaatggcagagaggaaagtcccttattgattggccaacaatcaacagtttctgatgttccgagggacctggaagttgttgctgcgacccccaccagcctactgatcagctgggatgctcctgctgtcacagtgagatattacaggatcacttacggagaaacaggaggaaatagccctgtccaggagttcactgtgcctgggagcaagtctacagctaccatcagcggccttaaacctggagttgattataccatcactgtgtatgctgtcactggccgtggagacagccccgcaagcagcaagccaatttccattaattaccgaacagaaattgacaaaccatcccagatgcaagtgaccgatgttcaggacaacagcattagtgtcaagtggctgccttcaagttcccctgttactggttacagagtaaccaccactcccaaaaatggaccaggaccaacaaaaactaaaactgcaggtccagatcaaacagaaatgactattgaaggcttgcagcccacagtggagtatgtggttagtgtctatgctcagaatccaagcggagagagtcagcctctggttcagactgcagtaaccaacattgatcgccctaaaggactggcattcactgatgtggatgtcgattccatcaaaattgcttgggaaagcccacaggggcaagtttccaggtacagggtgacctactcgagccctgaggatggaatccatgagctattccctgcacctgatggtgaagaagacactgcagagctgcaaggcctcagaccgggttctgagtacacagtcagtgtggttgccttgcacgatgatatggagagccagcccctgattggaacccagtccacagctattcctgcaccaactgacctgaagttcactcaggtcacacccacaagcctgagcgcccagtggacaccacccaatgttcagctcactggatatcgagtgcgggtgacccccaaggagaagaccggaccaatgaaagaaatcaaccttgctcctgacagctcatccgtggttgtatcaggacttatggtggccaccaaatatgaagtgagtgtctatgctcttaaggacactttgacaagcagaccagctcagggtgttgtcaccactctggagaatgtcagcccaccaagaagggctcgtgtgacagatgctactgagaccaccatcaccattagctggagaaccaagactgagacgatcactggcttccaagttgatgccgttccagccaatggccagactccaatccagagaaccatcaagccagatgtcagaagctacaccatcacaggtttacaaccaggcactgactacaagatctacctgtacaccttgaatgacaatgctcggagctcccctgtggtcatcgacgcctccactgccattgatgcaccatccaacctgcgtttcctggccaccacacccaattccttgctggtatcatggcagccgccacgtgccaggattaccggctacatcatcaagtatgagaagcctgggtctcctcccagagaagtggtccctcggccccgccctggtgtcacagaggctactattactggcctggaaccgggaaccgaatatacaatttatgtcattgccctgaagaataatcagaagagcgagcccctgattggaaggaaaaagacaggacaagaagctctctctcagacaaccatctcatgggccccattccaggacacttctgagtacatcatttcatgtcatcctgttggcactgatgaagaacccttacagttcagggttcctggaacttctaccagtgccactctgacaggcctcaccagaggtgccacctacaacatcatagtggaggcactgaaagaccagcagaggcataaggttcgggaagaggttgttaccgtgggcaactctgtcaacgaaggcttgaaccaacctacggatgactcgtgctttgacccctacacagtttcccattatgccgttggagatgagtgggaacgaatgtctgaatcaggctttaaactgttgtgccagtgcttaggctttggaagtggtcatttcagatgtgattcatctagatggtgccatgacaatggtgtgaactacaagattggagagaagtgggaccgtcagggagaaaatggccagatgatgagctgcacatgtcttgggaacggaaaaggagaattcaagtgtgaccctcatgaggcaacgtgttacgatgatgggaagacataccacgtaggagaacagtggcagaaggaatatctcggtgccatttgctcctgcacatgctttggaggccagcggggctggcgctgtgacaactgccgcagacctgggggtgaacccagtcccgaaggcactactggccagtcctacaaccagtattctcagagataccatcagagaacaaacactaatgttaattgcccaattgagtgcttcatgcctttagatgtacaggctgacagagaagattcccgagagtaaatcatctttccaatccagaggaacaagcatgtctctctgccaagatccatctaaactggagtgatgttagcagacccagcttagagttcttctttctttcttaagccctttgctctggaggaagttctccagcttcagctcaactcacagcttctccaagcatcaccctgggagtttcctgagggttttctcataaatgagggctgcacattgcctgttctgcttcgaagtattcaataccgctcagtattttaaatgaagtgattctaagatttggtttgggatcaataggaaagcatatgcagccaaccaagatgcaaatgttttgaaatgattgtctggcccgcaatactgtaggaacaagcatgatcttgttactgtgatattttaaatatccacagtactcactttttccaaatgatcctagtaattgcctagaaatatctttctcttacctgttatttatcaatttttcccagtatttttatacggaaaaaattgtattgaaaacacttagtatgcagttgataagaggaatttggtataattatggtgggtgattattttttatactgtatgtgccaaagctttactactgtggaaagacaactgttttaataaaagatttacattccacaacttgaagttcatctatttgatataagacaccttcgggggaaataattcctgtgaatattctttttcaattcagcaaacatttgaaaatctatgatgtgcaagtctaattgttgatttcagtacaagattttctaaatcagttgctacaaaaactgattggtttttgtcacttcatctcttcactaatggagatagcttt

SEQ ID NO: 15 - DNA, 7935 bp, Homo sapiens
ggcggggcggggacagcccggcgggtctctcctcccccgcgccccgggcctccagaggggcgggaggggaccgtcccatataagccccggctcccggcgctcggacgcccgcgccggctgtgctgcacagggggaggagagggaaccccaggcgcgagcgggaagaggggacctgcagccacaacttctctggtcctctgcatcccttctgtccctccacccgtccccttccccaccctctggcccccaccttcttggaggcgacaacccccgggaggcattagaagggatttttcccgcaggttgcgaagggaagcaaacttggtggcaacttgcctcccggtgcgggcgtctctcccccaccgtctcaacatgcttaggggtccggggcccgggctgctgctgctggccgtcctgtgcctggggacagcggtgccctccacgggagcctcgaagagcaagaggcaggctcagcaaatggttcagccccagtccccggtggctgtcagtcaaagcaagcccggttgttatgacaatggaaaacactatcagataaatcaacagtgggagcggacctacctaggcaatgcgttggtttgtacttgttatggaggaagccgaggttttaactgcgagagtaaacctgaagctgaagagacttgctttgacaagtacactgggaacacttaccgagtgggtgacacttatgagcgtcctaaagactccatgatctgggactgtacctgcatcggggctgggcgagggagaataagctgtaccatcgcaaaccgctgccatgaagggggtcagtcctacaagattggtgacacctggaggagaccacatgagactggtggttacatgttagagtgtgtgtgtcttggtaatggaaaaggagaatggacctgcaagcccatagctgagaagtgttttgatcatgctgctgggacttcctatgtggtcggagaaacgtgggagaagccctaccaaggctggatgatggtagattgtacttgcctgggagaaggcagcggacgcatcacttgcacttctagaaatagatgcaacgatcaggacacaaggacatcctatagaattggagacacctggagcaagaaggataatcgaggaaacctgctccagtgcatctgcacaggcaacggccgaggagagtggaagtgtgagaggcacacctctgtgcagaccacatcgagcggatctggccccttcaccgatgttcgtgcagctgtttaccaaccgcagcctcacccccagcctcctccctatggccactgtgtcacagacagtggtgtggtctactctgtggggatgcagtggctgaagacacaaggaaataagcaaatgctttgcacgtgcctgggcaacggagtcagctgccaagagacagctgtaacccagacttacggtggcaactcaaatggagagccatgtgtcttaccattcacctacaatggcaggacgttctactcctgcaccacagaagggcgacaggacggacatctttggtgcagcacaacttcgaattatgagcaggaccagaaatactctttctgcacagaccacactgttttggttcagactcgaggaggaaattccaatggtgccttgtgccacttccccttcctatacaacaaccacaattacactgattgcacttctgagggcagaagagacaacatgaagtggtgtgggaccacacagaactatgatgccgaccagaagtttgggttctgccccatggctgcccacgaggaaatctgcacaaccaatgaaggggtcatgtaccgcattggagatcagtgggataagcagcatgacatgggtcacatgatgaggtgcacgtgtgttgggaatggtcgtggggaatggacatgcattgcctactcgcagcttcgagatcagtgcattgttgatgacatcacttacaatgtgaacgacacattccacaagcgtcatgaagaggggcacatgctgaactgtacatgcttcggtcagggtcggggcaggtggaagtgtgatcccgtcgaccaatgccaggattcagagactgggacgttttatcaaattggagattcatgggagaagtatgtgcatggtgtcagataccagtgctactgctatggccgtggcattggggagtggcattgccaacctttacagacctatccaagctcaagtggtcctgtcgaagtatttatcactgagactccgagtcagcccaactcccaccccatccagtggaatgcaccacagccatctcacatttccaagtacattctcaggtggagacctaaaaattctgtaggccgttggaaggaagctaccataccaggccacttaaactcctacaccatcaaaggcctgaagcctggtgtggtatacgagggccagctcatcagcatccagcagtacggccaccaagaagtgactcgctttgacttcaccaccaccagcaccagcacacctgtgaccagcaacaccgtgacaggagagacgactcccttttctcctcttgtggccacttctgaatctgtgaccgaaatcacagccagtagctttgtggtctcctgggtctcagcttccgacaccgtgtcgggattccgggtggaatatgagctgagtgaggagggagatgagccacagtacctggatcttccaagcacagccacttctgtgaacatccctgacctgcttcctggccgaaaatacattgtaaatgtctatcagatatctgaggatggggagcagagtttgatcctgtctacttcacaaacaacagcgcctgatgccccacctgacccgactgtggaccaagttgatgacacctcaattgttgttcgctggagcagaccccaggctcccatcacaggtcagctaaaatagtctattcgccatcagtagaaggtagcagcacagaactcaaccttcctgaaactgcaaactccgtcaccctcagtgacttgcaacctggtgttcagtataacatcactatctatgctgtggaagaaaatcaagaaagtacacctgttgtcattcaacaagaaaccactggcaccccacgctcagatacagtgccctctcccagggacctgcagtttgtggaagtgacagacgtgaaggtcaccatcatgtggacaccgcctgagagtgcagtgaccggctaccgtgtggatgtgatccccgtcaacctgcctggcgagcacgggcagaggctgcccatcagcaggaacacctttgcagaagtcaccgggctgtcccctggggtcacctattacttcaaagtctttgcagtgagccatgggagggagagcaagcctctgactgctcaacagacaaccaaactggatgctcccactaacctccagtttgtcaatgaaactgattctactgtcctggtgagatggactccacctcgggcccagataacaggataccgactgaccgtgggccttacccgaagaggacagcccaggcagtacaatgtgggtccctctgtctccaagtacccactgaggaatctgcagcctgcatctgagtacaccgtatccctcgtggccataaagggcaaccaagagagccccaaagccactggagtctttaccacactgcagcctgggagctctattccaccttacaacaccgaggtgactgagaccaccattgtgatcacatggacgcctgctccaagaattggttttaagctgggtgtacgaccaagccagggaggagaggcaccacgagaagtgacttcagactcaggaagcatcgttgtgtccggcttgactccaggagtagaatacgtctacaccatccaagtcctgagagatggacaggaaagagatgcgccaattgtaaacaaagtggtgacaccattgtctccaccaacaaacttgcatctggaggcaaaccctgacactggagtgctcacagtctcctgggagaggagcaccaccccagacattactggttatagaattaccacaacccctacaaacggccagcagggaaattctttggaagaagtggtccatgctgatcagagctcctgcacttttgataacctgagtcccggcctggagtacaatgtcagtgtttacactgtcaaggatgacaaggaaagtgtccctatctctgataccatcatcccagctgttcctcctcccactgacctgcgattcaccaacattggtccagacaccatgcgtgtcacctgggctccacccccatccattgatttaaccaacttcctggtgcgttactcacctgtgaaaaatgaggaagatgttgcagagttgtcaatttctccttcagacaatgcagtggtcttaacaaatctcctgcctggtacagaatatgtagtgagtgtctccagtgtctacgaacaacatgagagcacacctcttagaggaagacagaaaacaggtcttgattccccaactggcattgacttttctgatattactgccaactcttttactgtgcactggattgctcctcgagccaccatcactggctacaggatccgccatcatcccgagcacttcagtgggagacctcgagaagatcgggtgccccactctcggaattccatcaccctcaccaacctcactccaggcacagagtatgtggtcagcatcgttgctcttaatggcagagaggaaagtcccttattgattggccaacaatcaacagtttctgatgttccgagggacctggaagttgttgctgcgacccccaccagcctactgatcagctgggatgctcctgctgtcacagtgagatattacaggatcacttacggagaaacaggaggaaatagccctgtccaggagttcactgtgcctgggagcaagtctacagctaccatcagcggccttaaacctggagttgattataccatcactgtgtatgctgtcactggccgtggagacagccccgcaagcagcaagccaatttccattaattaccgaacagaaattgacaaaccatcccagatgcaagtgaccgatgttcaggacaacagcattagtgtcaagtggctgccttcaagttcccctgttactggttacagagtaaccaccactcccaaaaatggaccaggaccaacaaaaactaaaactgcaggtccagatcaaacagaaatgactattgaaggcttgcagcccacagtggagtatgtggttagtgtctatgctcagaatccaagcggagagagtcagcctctggttcagactgcagtaaccactattcctgcaccaactgacctgaagttcactcaggtcacacccacaagcctgagcgcccagtggacaccacccaatgttcagctcactggatatcgagtgcgggtgacccccaaggagaagaccggaccaatgaaagaaatcaaccttgctcctgacagctcatccgtggttgtatcaggacttatggtggccaccaaatatgaagtgagtgtctatgctcttaaggacactttgacaagcagaccagctcagggtgttgtcaccactctggagaatgtcagcccaccaagaagggctcgtgtgacagatgctactgagaccaccatcaccattagctggagaaccaagactgagacgatcactggcttccaagttgatgccgttccagccaatggccagactccaatccagagaaccatcaagccagatgtcagaagctacaccatcacaggtttacaaccaggcactgactacaagatctacctgtacaccttgaatgacaatgctcggagctcccctgtggtcatcgacgcctccactgccattgatgcaccatccaacctgcgtttcctggccaccacacccaattccttgctggtatcatggcagccgccacgtgccaggattaccggctacatcatcaagtatgagaagcctgggtctcctcccagagaagtggtccctcggccccgccctggtgtcacagaggctactattactggcctggaaccgggaaccgaatatacaatttatgtcattgccctgaagaataatcagaagagcgagcccctgattggaaggaaaaagacagttcaaaagacccctttcgtcacccaccctgggtatgacactggaaatggtattcagcttcctggcacttctggtcagcaacccagtgttgggcaacaaatgatctttgaggaacatggttttaggcggaccacaccgcccacaacggccacccccataaggcataggccaagaccatacccgccgaatgtaggacaagaagctctctctcagacaaccatctcatgggccccattccaggacacttctgagtacatcatttcatgtcatcctgttggcactgatgaagaacccttacagttcagggttcctggaacttctaccagtgccactctgacaggcctcaccagaggtgccacctacaacatcatagtggaggcactgaaagaccagcagaggcataaggttcgggaagaggttgttaccgtgggcaactctgtcaacgaaggcttgaaccaacctacggatgactcgtgctttgacccctacacagtttcccattatgccgttggagatgagtgggaacgaatgtctgaatcaggctttaaactgttgtgccagtgcttaggctttggaagtggtcatttcagatgtgattcatctagatggtgccatgacaatggtgtgaactacaagattggagagaagtgggaccgtcagggagaaaatggccagatgatgagctgcacatgtcttgggaacggaaaaggagaattcaagtgtgaccctcatgaggcaacgtgttacgatgatgggaagacataccacgtaggagaacagtggcagaaggaatatctcggtgccatttgctcctgcacatgctttggaggccagcggggctggcgctgtgacaactgccgcagacctgggggtgaacccagtcccgaaggcactactggccagtcctacaaccagtattctcagagataccatcagagaacaaacactaatgttaattgcccaattgagtgcttcatgcctttagatgtacaggctgacagagaagattcccgagagtaaatcatctttccaatccagaggaacaagcatgtctctctgccaagatccatctaaactggagtgatgttagcagacccagcttagagttcttctttctttcttaagccctttgctctggaggaagttctccagcttcagctcaactcacagcttctccaagcatcaccctgggagtttcctgagggttttctcataaatgagggctgcacattgcctgttctgcttcgaagtattcaataccgctcagtattttaaatgaagtgattctaagatttggtttgggatcaataggaaagcatatgcagccaaccaagatgcaaatgttttgaaatgattgtctggcccgcaatactgtaggaacaagcatgatcttgttactgtgatattttaaatatccacagtactcactttttccaaatgatcctagtaattgcctagaaatatctttctcttacctgttatttatcaatttttcccagtatttttatacggaaaaaattgtattgaaaacacttagtatgcagttgataagaggaatttggtataattatggtgggtgattattttttatactgtatgtgccaaagctttactactgtggaaagacaactgttttaataaaagatttacattccacaacttgaagttcatctatttgatataagacaccttcgggggaaataattcctgtgaatattctttttcaattcagcaaacatttgaaaatctatgatgtgcaagtctaattgttgatttcagtacaagattttctaaatcagttgctacaaaaactgattggtttttgtcacttcatctcttcactaatggagatagcttt

SEQ ID NO: 16 - DNA, 8155 bp, Homo sapiens
ggcggggcggggacagcccggcgggtctctcctcccccgcgccccgggcctccagaggggcgggaggggaccgtcccatataagccccggctcccggcgctcggacgcccgcgccggctgtgctgcacagggggaggagagggaaccccaggcgcgagcgggaagaggggacctgcagccacaacttctctggtcctctgcatcccttctgtccctccacccgtccccttccccaccctctggcccccaccttcttggaggcgacaacccccgggaggcattagaagggatttttcccgcaggttgcgaagggaagcaaacttggtggcaacttgcctcccggtgcgggcgtctctcccccaccgtctcaacatgcttaggggtccggggcccgggctgctgctgctggccgtcctgtgcctggggacagcggtgccctccacgggagcctcgaagagcaagaggcaggctcagcaaatggttcagccccagtccccggtggctgtcagtcaaagcaagcccggttgttatgacaatggaaaacactatcagataaatcaacagtgggagcggacctacctaggcaatgcgttggtttgtacttgttatggaggaagccgaggttttaactgcgagagtaaacctgaagctgaagagacttgctttgacaagtacactgggaacacttaccgagtgggtgacacttatgagcgtcctaaagactccatgatctgggactgtacctgcatcggggctgggcgagggagaataagctgtaccatcgcaaaccgctgccatgaagggggtcagtcctacaagattggtgacacctggaggagaccacatgagactggtggttacatgttagagtgtgtgtgtcttggtaatggaaaaggagaatggacctgcaagcccatagctgagaagtgttttgatcatgctgctgggacttcctatgtggtcggagaaacgtgggagaagccctaccaaggctggatgatggtagattgtacttgcctgggagaaggcagcggacgcatcacttgcacttctagaaatagatgcaacgatcaggacacaaggacatcctatagaattggagacacctggagcaagaaggataatcgaggaaacctgctccagtgcatctgcacaggcaacggccgaggagagtggaagtgtgagaggcacacctctgtgcagaccacatcgagcggatctggccccttcaccgatgttcgtgcagctgtttaccaaccgcagcctcacccccagcctcctccctatggccactgtgtcacagacagtggtgtggtctactctgtggggatgcagtggctgaagacacaaggaaataagcaaatgctttgcacgtgcctgggcaacggagtcagctgccaagagacagctgtaacccagacttacggtggcaactcaaatggagagccatgtgtcttaccattcacctacaatggcaggacgttctactcctgcaccacagaagggcgacaggacggacatctttggtgcagcacaacttcgaattatgagcaggaccagaaatactctttctgcacagaccacactgttttggttcagactcgaggaggaaattccaatggtgccttgtgccacttccccttcctatacaacaaccacaattacactgattgcacttctgagggcagaagagacaacatgaagtggtgtgggaccacacagaactatgatgccgaccagaagtttgggttctgccccatggctgcccacgaggaaatctgcacaaccaatgaaggggtcatgtaccgcattggagatcagtgggataagcagcatgacatgggtcacatgatgaggtgcacgtgtgttgggaatggtcgtggggaatggacatgcattgcctactcgcagcttcgagatcagtgcattgttgatgacatcacttacaatgtgaacgacacattccacaagcgtcatgaagaggggcacatgctgaactgtacatgcttcggtcagggtcggggcaggtggaagtgtgatcccgtcgaccaatgccaggattcagagactgggacgttttatcaaattggagattcatgggagaagtatgtgcatggtgtcagataccagtgctactgctatggccgtggcattggggagtggcattgccaacctttacagacctatccaagctcaagtggtcctgtcgaagtatttatcactgagactccgagtcagcccaactcccaccccatccagtggaatgcaccacagccatctcacatttccaagtacattctcaggtggagacctaaaaattctgtaggccgttggaaggaagctaccataccaggccacttaaactcctacaccatcaaaggcctgaagcctggtgtggtatacgagggccagctcatcagcatccagcagtacggccaccaagaagtgactcgctttgacttcaccaccaccagcaccagcacacctgtgaccagcaacaccgtgacaggagagacgactcccttttctcctcttgtggccacttctgaatctgtgaccgaaatcacagccagtagctttgtggtctcctgggtctcagcttccgacaccgtgtcgggattccgggtggaatatgagctgagtgaggagggagatgagccacagtacctggatcttccaagcacagccacttctgtgaacatccctgacctgcttcctggccgaaaatacattgtaaatgtctatcagatatctgaggatggggagcagagtttgatcctgtctacttcacaaacaacagcgcctgatgccccacctgacccgactgtggaccaagttgatgacacctcaattgttgttcgctggagcagaccccaggctcccatcacagggtacagaatagtctattcgccatcagtagaaggtagcagcacagaactcaaccttcctgaaactgcaaactccgtcaccctcagtgacttgcaacctggtgttcagtataacatcactatctatgctgtggaagaaaatcaagaaagtacacctgttgtcattcaacaagaaaccactggcaccccacgctcagatacagtgccctctcccagggacctgcagtttgtggaagtgacagacgtgaaggtcaccatcatgtggacaccgcctgagagtgcagtgaccggctaccgtgtggatgtgatccccgtcaacctgcctggcgagcacgggcagaggctgcccatcagcaggaacacctttgcagaagtcaccgggctgtcccctggggtcacctattacttcaaagtctttgcagtgagccatgggagggagagcaagcctctgactgctcaacagacaaccaaactggatgctcccactaacctccagtttgtcaatgaaactgattctactgtcctggtgagatggactccacctcgggcccagataacaggataccgactgaccgtgggccttacccgaagaggacagcccaggcagtacaatgtgggtccctctgtctccaagtacccactgaggaatctgcagcctgcatctgagtacaccgtatccctcgtggccataaagggcaaccaagagagccccaaagccactggagtctttaccacactgcagcctgggagctctattccaccttacaacaccgaggtgactgagaccaccattgtgatcacatggacgcctgctccaagaattggttttaagctgggtgtacgaccaagccagggaggagaggcaccacgagaagtgacttcagactcaggaagcatcgttgtgtccggcttgactccaggagtagaatacgtctacaccatccaagtcctgagagatggacaggaaagagatgcgccaattgtaaacaaagtggtgacaccattgtctccaccaacaaacttgcatctggaggcaaaccctgacactggagtgctcacagtctcctgggagaggagcaccaccccagacattactggttatagaattaccacaacccctacaaacggccagcagggaaattctttggaagaagtggtccatgctgatcagagctcctgcacttttgataacctgagtcccggcctggagtacaatgtcagtgtttacactgtcaaggatgacaaggaaagtgtccctatctctgataccatcatcccagctgttcctcctcccactgacctgcgattcaccaacattggtccagacaccatgcgtgtcacctgggctccacccccatccattgatttaaccaacttcctggtgcgttactcacctgtgaaaaatgaggaagatgttgcagagttgtcaatttctccttcagacaatgcagtggtcttaacaaatctcctgcctggtacagaatatgtagtgagtgtctccagtgtctacgaacaacatgagagcacacctcttagaggaagacagaaaacaggtcttgattccccaactggcattgacttttctgatattactgccaactcttttactgtgcactggattgctcctcgagccaccatcactggctacaggatccgccatcatcccgagcacttcagtgggagacctcgagaagatcgggtgccccactctcggaattccatcaccctcaccaacctcactccaggcacagagtatgtggtcagcatcgttgctcttaatggcagagaggaaagtcccttattgattggccaacaatcaacagtttctgatgttccgagggacctggaagttgttgctgcgacccccaccagcctactgatcagctgggatgctcctgctgtcacagtgagatattacaggatcacttacggagaaacaggaggaaatagccctgtccaggagttcactgtgcctgggagcaagtctacagctaccatcagcggccttaaacctggagttgattataccatcactgtgtatgctgtcactggccgtggagacagccccgcaagcagcaagccaatttccattaattaccgaacagaaattgacaaaccatcccagatgcaagtgaccgatgttcaggacaacagcattagtgtcaagtggctgccttcaagttcccctgttactggttacagagtaaccaccactcccaaaaatggaccaggaccaacaaaaactaaaactgcaggtccagatcaaacagaaatgactattgaaggcttgcagcccacagtggagtatgtggttagtgtctatgctcagaatccaagcggagagagtcagcctctggttcagactgcagtaaccactattcctgcaccaactgacctgaagttcactcaggtcacacccacaagcctgagcgcccagtggacaccacccaatgttcagctcactggatatcgagtgcgggtgacccccaaggagaagaccggaccaatgaaagaaatcaaccttgctcctgacagctcatccgtggttgtatcaggacttatggtggccaccaaatatgaagtgagtgtctatgctcttaaggacactttgacaagcagaccagctcagggtgttgtcaccactctggagaatgtcagcccaccaagaagggctcgtgtgacagatgctactgagaccaccatcaccattagctggagaaccaagactgagacgatcactggcttccaagttgatgccgttccagccaatggccagactccaatccagagaaccatcaagccagatgtcagaagctacaccatcacaggtttacaaccaggcactgactacaagatctacctgtacaccttgaatgacaatgctcggagctcccctgtggtcatcgacgcctccactgccattgatgcaccatccaacctgcgtttcctggccaccacacccaattccttgctggtatcatggcagccgccacgtgccaggattaccggctacatcatcaagtatgagaagcctgggtctcctcccagagaagtggtccctcggccccgccctggtgtcacagaggctactattactggcctggaaccgggaaccgaatatacaatttatgtcattgccctgaagaataatcagaagagcgagcccctgattggaaggaaaaagacagacgagcttccccaactggtaacccttccacaccccaatcttcatggaccagagatcttggatgttccttccacagttcaaaagacccctttcgtcacccaccctgggtatgacactggaaatggtattcagcttcctggcacttctggtcagcaacccagtgttgggcaacaaatgatctttgaggaacatggttttaggcggaccacaccgcccacaacggccacccccataaggcataggccaagaccatacccgccgaatgtaggtgaggaaatccaaattggtcacatccccagggaagatgtagactatcacctgtacccacacggtccgggactcaatccaaatgcctctacaggacaagaagctctctctcagacaaccatctcatgggccccattccaggacacttctgagtacatcatttcatgtcatcctgttggcactgatgaagaacccttacagttcagggttcctggaacttctaccagtgccactctgacaggcctcaccagaggtgccacctacaacatcatagtggaggcactgaaagaccagcagaggcataaggttcgggaagaggttgttaccgtgggcaactctgtcaacgaaggcttgaaccaacctacggatgactcgtgctttgacccctacacagtttcccattatgccgttggagatgagtgggaacgaatgtctgaatcaggctttaaactgttgtgccagtgcttaggctttggaagtggtcatttcagatgtgattcatctagatggtgccatgacaatggtgtgaactacaagattggagagaagtgggaccgtcagggagaaaatggccagatgatgagctgcacatgtcttgggaacggaaaaggagaattcaagtgtgaccctcatgaggcaacgtgttacgatgatgggaagacataccacgtaggagaacagtggcagaaggaatatctcggtgccatttgctcctgcacatgctttggaggccagcggggctggcgctgtgacaactgccgcagacctgggggtgaacccagtcccgaaggcactactggccagtcctacaaccagtattctcagagataccatcagagaacaaacactaatgttaattgcccaattgagtgcttcatgcctttagatgtacaggctgacagagaagattcccgagagtaaatcatctttccaatccagaggaacaagcatgtctctctgccaagatccatctaaactggagtgatgttagcagacccagcttagagttcttctttctttcttaagccctttgctctggaggaagttctccagcttcagctcaactcacagcttctccaagcatcaccctgggagtttcctgagggttttctcataaatgagggctgcacattgcctgttctgcttcgaagtattcaataccgctcagtattttaaatgaagtgattctaagatttggtttgggatcaataggaaagcatatgcagccaaccaagatgcaaatgttttgaaatgatatgaccaaaattttaagtaggaaagtcacccaaacacttctgctttcacttaagtgtctggcccgcaatactgtaggaacaagcatgatcttgttactgtgatattttaaatatccacagtactcactttttccaaatgatcctagtaattgcctagaaatatctttctcttacctgttatttatcaatttttcccagtatttttatacggaaaaaattgtattgaaaacacttagtatgcagttgataagaggaatttggtataattatggtgggtgattattttttatactgtatgtgccaaagctttactactgtggaaagacaactgttttaataaaagatttacattccacaacttgaagttcatctatttgatataagacaccttcgggggaaataattcctgtgaatattctttttcaattcagcaaacatttgaaaatctatgatgtgcaagtctaattgttgatttcagtacaagattttctaaatcagttgctacaaaaactgattggtttttgtcacttcatctcttcactaatggagatagcttt

SEQ ID NO: 17 - DNA, 3834 bp, Homo sapiens
ctttcccgagtccgtttgaggaagtccccgaggcgcacagagcaagcccacgcgagggcacctctggaggggagcgcctgcaggaccttgtaaagtcaaaaatgtcagaaacttccaggaccgcctttggaggcagaagagcagttccacccaataactctaatgcagcggaagatgacctgcccacagtggagcttcagggcgtggtgccccggggcgtcaacctgcaagagtttcttaatgtcacgagcgttcacctgttcaaggagagatgggacactaacaaggtggaccaccacactgacaagtatgaaaacaacaagctgattgtccgcagagggcagtctttctatgtgcagattgacttcagtcgtccatatgaccccagaagggatctcttcagggtggaatacgtcattggtcgctacccacaggagaacaagggaacctacatcccagtgcctatagtctcagagttacaaagtggaaagtggggggccaagattgtcatgagagaggacaggtctgtgcggctgtccatccagtcttcccccaaatgtattgtggggaaattccgcatgtatgttgctgtctggactccctatggcgtacttcgaaccagtcgaaacccagaaacagacacgtacattctcttcaatccttggtgtgaagatgatgctgtgtatctggacaatgagaaagaaagagaagagtatgtcctgaatgacatcggggtaattttttatggagaggtcaatgacatcaagaccagaagctggagctatggtcagtttgaagatggcatcctggacacttgcctgtatgtgatggacagagcacaaatggacctctctggaagagggaatcccatcaaagtcagccgtgtggggtctgcaatggtgaatgccaaagatgacgaaggtgtcctcgttggatcctgggacaatatctatgcctatggcgtccccccatcggcctggactggaagcgttgacattctattggaataccggagctctgagaatccagtccggtatggccaatgctgggtttttgctggtgtctttaacacatttttacgatgccttggaataccagcaagaattgttaccaattatttctctgcccatgataatgatgccaatttgcaaatggacatcttcctggaagaagatgggaacgtgaattccaaactcaccaaggattcagtgtggaactaccactgctggaatgaagcatggatgacaaggcctgaccttcctgttggatttggaggctggcaagctgtggacagcaccccccaggaaaatagcgatggcatgtatcggtgtggccccgcctcggttcaagccatcaagcacggccatgtctgcttccaatttgatgcaccttttgtttttgcagaggtcaacagcgacctcatttacattacagctaagaaagatggcactcatgtggtggaaaatgtggatgccacccacattgggaaattaattgtgaccaaacaaattggaggagatggcatgatggatattactgatacttacaaattccaagaaggtcaagaagaagagagattggccctagaaactgccctgatgtacggagctaaaaagcccctcaacacagaaggtgtcatgaaatcaaggtccaacgttgacatggactttgaagtggaaaatgctgtgctgggaaaagacttcaagctctccatcaccttccggaacaacagccacaaccgttacaccatcacagcttatctctcagccaacatcaccttctacaccggggtcccgaaggcagaattcaagaaggagacgttcgacgtgacgctggagcccttgtccttcaagaaagaggcggtgctgatccaagccggcgagtacatgggtcagctgctggaacaagcgtccctgcacttctttgtcacagctcgcatcaatgagaccagggatgttctggccaagcaaaagtccaccgtgctaaccatccctgagatcatcatcaaggtccgtggcactcaggtagttggttctgacatgactgtgacaattcagtttaccaatcctttaaaagaaaccctgcgaaatgtctgggtacacctggatggtcctggagtaacaagaccaatgaagaagatgttccgtgaaatccggcccaactccaccgtgcagtgggaagaagtgtgccggccctgggtctctgggcatcggaagctgatagccagcatgagcagtgactccctgagacatgtgtatggcgagctggacgtgcagattcaaagacgaccttccatgtgaatgcacaggaagctgagatgaaccctggcatttggcctcttgtagtcttggctaaggaaattctaacgcaaaaatagctcttgctttgacttaggtgtgaagacccagacaggactgcagagggccccagagtggagatcccacatatttcaaaaacatgcttttccaaacccaggctattcggcaaggaagttagtttttaatctctccaccttccaaagagtgctaagcattagctttaattaagctctcatagctcataagagtaacagtcatcatttatcatcacaaatggctacatctccaaatatcagtgggctctcttaccagggagatttgctcaatacctggcctcatttaaaacaagacttcagattccccactcagccttttgggaataatagcacatgatttgggctctagaattccagtcccctttctcggggtcaggttctaccctccatgtgagaatatttttcccaggactagagcacaacataatttttatttttggcaaagccagaaaaagatctttcattttgcacctgcagccaagcaaatgcctgccaaattttagatttaccttgttagaagaggtggccccatattaacaaattgcatttgtgggaaacttaaccacctacaaggagataagaaagcaggtgcaacactcaagtctattgaataatgtagttttgtgatgcattttatagaatgtgtcacactgtggcctgatcagcaggagccaatatcccttactttaaccctttctgggatgcaatactaggaagtaaagtgaagaatttatctctttagttagtgattatatttcacccatctctcaggaatcatctcctttgcagaatgatgcaggttcaggtcccctttcagagatataataagcccaacaagttgaagaagctggcggatctagtgaccagatatatagaaggactgcagccactgattctctcttgtccttcacatcacccatgttgagacctcagcttggcactcaggtgctgaagggtaatatggactcagccttgcaaatagccagtgctagttctgacccaaccacagaggatgctgacatcatttgtattatgttccaaggctactacagagaaggctgcctgctatgtatttgcaaggctgatttatggtcagaatttccctctgatatgtctagggtgtgatttaggtcagtagactgtgattcttagcaaaaaatgaacagtgataagtatactgggggcaaaatcagaatggaatgctctggtctatataaccacatttctaagcctttgagactgttcctgagccttcagcactaacctatgagggtgagctggtcccctctatatatacatcatacttaactttactaagtaatctcacagcatttgccaagtctcccaatatccaattttaaaatgaaatgcattttgctagacagttaaactggcttaacttagtatattattattaattacaatgtaatagaagcttaaaataaagttaaactgattat

SEQ ID NO: 18 - DNA, 2585 bp, Homo sapiens
gacatgccccgcggcgcgccattaaccgccagatttgaatcgcgggacccgttggcagaggtggcggcggcggcatgggtgccccgacgttgccccctgcctggcagccctttctcaaggaccaccgcatctctacattcaagaactggcccttcttggagggctgcgcctgcaccccggagcggatggccgaggctggcttcatccactgccccactgagaacgagccagacttggcccagtgtttcttctgcttcaaggagctggaaggctgggagccagatgacgaccccatagaggaacataaaaagcattcgtccggttgcgctttcctttctgtcaagaagcagtttgaagaattaacccttggtgaatttttgaaactggacagagaaagagccaagaacaaaattgcaaaggaaaccaacaataagaagaaagaatttgaggaaactgcgaagaaagtgcgccgtgccatcgagcagctggctgccatggattgaggcctctggccggagctgcctggtcccagagtggctgcaccacttccagggtttattccctggtgccaccagccttcctgtgggccccttagcaatgtcttaggaaaggagatcaacattttcaaattagatgtttcaactgtgctcttgttttgtcttgaaagtggcaccagaggtgcttctgcctgtgcagcgggtgctgctggtaacagtggctgcttctctctctctctctcttttttgggggctcatttttgctgttttgattcccgggcttaccaggtgagaagtgagggaggaagaaggcagtgtcccttttgctagagctgacagctttgttcgcgtgggcagagccttccacagtgaatgtgtctggacctcatgttgttgaggctgtcacagtcctgagtgtggacttggcaggtgcctgttgaatctgagctgcaggttccttatctgtcacacctgtgcctcctcagaggacagtttttttgttgttgtgtttttttgtttttttttttttggtagatgcatgacttgtgtgtgatgagagaatggagacagagtccctggctcctctactgtttaacaacatggctttcttattttgtttgaattgttaattcacagaatagcacaaactacaattaaaactaagcacaaagccattctaagtcattggggaaacggggtgaacttcaggtggatgaggagacagaatagagtgataggaagcgtctggcagatactccttttgccactgctgtgtgattagacaggcccagtgagccgcggggcacatgctggccgctcctccctcagaaaaaggcagtggcctaaatcctttttaaatgacttggctcgatgctgtgggggactggctgggctgctgcaggccgtgtgtctgtcagcccaaccttcacatctgtcacgttctccacacgggggagagacgcagtccgcccaggtccccgctttctttggaggcagcagctcccgcagggctgaagtctggcgtaagatgatggatttgattcgccctcctccctgtcatagagctgcagggtggattgttacagcttcgctggaaacctctggaggtcatctcggctgttcctgagaaataaaaagcctgtcatttcaaacactgctgtggaccctactgggtttttaaaatattgtcagtttttcatcgtcgtccctagcctgccaacagccatctgcccagacagccgcagtgaggatgagcgtcctggcagagacgcagttgtctctgggcgcttgccagagccacgaaccccagacctgtttgtatcatccgggctccttccgggcagaaacaactgaaaatgcacttcagacccacttatttctgccacatctgagtcggcctgagatagacttttccctctaaactgggagaatatcacagtggtttttgttagcagaaaatgcactccagcctctgtactcatctaagctgcttatttttgatatttgtgtcagtctgtaaatggatacttcactttaataactgttgcttagtaattggctttgtagagaagctggaaaaaaatggttttgtcttcaactcctttgcatgccaggcggtgatgtggatctcggcttctgtgagcctgtgctgtgggcagggctgagctggagccgcccctctcagcccgcctgccacggcctttccttaaaggccatccttaaaaccagaccctcatggctaccagcacctgaaagcttcctcgacatctgttaataaagccgtaggcccttgtctaagtgcaaccgcctagactttctttcagatacatgtccacatgtccatttttcaggttctctaagttggagtggagtctgggaagggttgtgaatgaggcttctgggctatgggtgaggttccaatggcaggttagagcccctcgggccaactgccatcctggaaagtagagacagcagtgcccgctgcccagaagagaccagcaagccaaactggagcccccattgcaggctgtcgccatgtggaaagagtaactcacaattgccaataaagtctcatgtggttttatctac

SEQ ID NO: 19 - DNA, 2654 bp, Homo sapiens
gacatgccccgcggcgcgccattaaccgccagatttgaatcgcgggacccgttggcagaggtggcggcggcggcatgggtgccccgacgttgccccctgcctggcagccctttctcaaggaccaccgcatctctacattcaagaactggcccttcttggagggctgcgcctgcaccccggagcggatggccgaggctggcttcatccactgccccactgagaacgagccagacttggcccagtgtttcttctgcttcaaggagctggaaggctgggagccagatgacgaccccattgggccgggcacggtggcttacgcctgtaataccagcactttgggaggccgaggcgggcggatcacgagagaggaacataaaaagcattcgtccggttgcgctttcctttctgtcaagaagcagtttgaagaattaacccttggtgaatttttgaaactggacagagaaagagccaagaacaaaattgcaaaggaaaccaacaataagaagaaagaatttgaggaaactgcgaagaaagtgcgccgtgccatcgagcagctggctgccatggattgaggcctctggccggagctgcctggtcccagagtggctgcaccacttccagggtttattccctggtgccaccagccttcctgtgggccccttagcaatgtcttaggaaaggagatcaacattttcaaattagatgtttcaactgtgctcttgttttgtcttgaaagtggcaccagaggtgcttctgcctgtgcagcgggtgctgctggtaacagtggctgcttctctctctctctctcttttttgggggctcatttttgctgttttgattcccgggcttaccaggtgagaagtgagggaggaagaaggcagtgtcccttttgctagagctgacagctttgttcgcgtgggcagagccttccacagtgaatgtgtctggacctcatgttgttgaggctgtcacagtcctgagtgtggacttggcaggtgcctgttgaatctgagctgcaggttccttatctgtcacacctgtgcctcctcagaggacagtttttttgttgttgtgtttttttgtttttttttttttggtagatgcatgacttgtgtgtgatgagagaatggagacagagtccctggctcctctactgtttaacaacatggctttcttattttgtttgaattgttaattcacagaatagcacaaactacaattaaaactaagcacaaagccattctaagtcattggggaaacggggtgaacttcaggtggatgaggagacagaatagagtgataggaagcgtctggcagatactccttttgccactgctgtgtgattagacaggcccagtgagccgcggggcacatgctggccgctcctccctcagaaaaaggcagtggcctaaatcctttttaaatgacttggctcgatgctgtgggggactggctgggctgctgcaggccgtgtgtctgtcagcccaaccttcacatctgtcacgttctccacacgggggagagacgcagtccgcccaggtccccgctttctttggaggcagcagctcccgcagggctgaagtctggcgtaagatgatggatttgattcgccctcctccctgtcatagagctgcagggtggattgttacagcttcgctggaaacctctggaggtcatctcggctgttcctgagaaataaaaagcctgtcatttcaaacactgctgtggaccctactgggtttttaaaatattgtcagtttttcatcgtcgtccctagcctgccaacagccatctgcccagacagccgcagtgaggatgagcgtcctggcagagacgcagttgtctctgggcgcttgccagagccacgaaccccagacctgtttgtatcatccgggctccttccgggcagaaacaactgaaaatgcacttcagacccacttatttctgccacatctgagtcggcctgagatagacttttccctctaaactgggagaatatcacagtggtttttgttagcagaaaatgcactccagcctctgtactcatctaagctgcttatttttgatatttgtgtcagtctgtaaatggatacttcactttaataactgttgcttagtaattggctttgtagagaagctggaaaaaaatggttttgtcttcaactcctttgcatgccaggcggtgatgtggatctcggcttctgtgagcctgtgctgtgggcagggctgagctggagccgcccctctcagcccgcctgccacggcctttccttaaaggccatccttaaaaccagaccctcatggctaccagcacctgaaagcttcctcgacatctgttaataaagccgtaggcccttgtctaagtgcaaccgcctagactttctttcagatacatgtccacatgtccatttttcaggttctctaagttggagtggagtctgggaagggttgtgaatgaggcttctgggctatgggtgaggttccaatggcaggttagagcccctcgggccaactgccatcctggaaagtagagacagcagtgcccgctgcccagaagagaccagcaagccaaactggagcccccattgcaggctgtcgccatgtggaaagagtaactcacaattgccaataaagtctcatgtggttttatctac

SEQ ID NO: 20 - DNA, 2467 bp, Homo sapiens
gacatgccccgcggcgcgccattaaccgccagatttgaatcgcgggacccgttggcagaggtggcggcggcggcatgggtgccccgacgttgccccctgcctggcagccctttctcaaggaccaccgcatctctacattcaagaactggcccttcttggagggctgcgcctgcaccccggagcggatggccgaggctggcttcatccactgccccactgagaacgagccagacttggcccagtgtttcttctgcttcaaggagctggaaggctgggagccagatgacgaccccatgcaaaggaaaccaacaataagaagaaagaatttgaggaaactgcgaagaaagtgcgccgtgccatcgagcagctggctgccatggattgaggcctctggccggagctgcctggtcccagagtggctgcaccacttccagggtttattccctggtgccaccagccttcctgtgggccccttagcaatgtcttaggaaaggagatcaacattttcaaattagatgtttcaactgtgctcttgttttgtcttgaaagtggcaccagaggtgcttctgcctgtgcagcgggtgctgctggtaacagtggctgcttctctctctctctctcttttttgggggctcatttttgctgttttgattcccgggcttaccaggtgagaagtgagggaggaagaaggcagtgtcccttttgctagagctgacagctttgttcgcgtgggcagagccttccacagtgaatgtgtctggacctcatgttgttgaggctgtcacagtcctgagtgtggacttggcaggtgcctgttgaatctgagctgcaggttccttatctgtcacacctgtgcctcctcagaggacagtttttttgttgttgtgtttttttgtttttttttttttggtagatgcatgacttgtgtgtgatgagagaatggagacagagtccctggctcctctactgtttaacaacatggctttcttattttgtttgaattgttaattcacagaatagcacaaactacaattaaaactaagcacaaagccattctaagtcattggggaaacggggtgaacttcaggtggatgaggagacagaatagagtgataggaagcgtctggcagatactccttttgccactgctgtgtgattagacaggcccagtgagccgcggggcacatgctggccgctcctccctcagaaaaaggcagtggcctaaatcctttttaaatgacttggctcgatgctgtgggggactggctgggctgctgcaggccgtgtgtctgtcagcccaaccttcacatctgtcacgttctccacacgggggagagacgcagtccgcccaggtccccgctttctttggaggcagcagctcccgcagggctgaagtctggcgtaagatgatggatttgattcgccctcctccctgtcatagagctgcagggtggattgttacagcttcgctggaaacctctggaggtcatctcggctgttcctgagaaataaaaagcctgtcatttcaaacactgctgtggaccctactgggtttttaaaatattgtcagtttttcatcgtcgtccctagcctgccaacagccatctgcccagacagccgcagtgaggatgagcgtcctggcagagacgcagttgtctctgggcgcttgccagagccacgaaccccagacctgtttgtatcatccgggctccttccgggcagaaacaactgaaaatgcacttcagacccacttatttctgccacatctgagtcggcctgagatagacttttccctctaaactgggagaatatcacagtggtttttgttagcagaaaatgcactccagcctctgtactcatctaagctgcttatttttgatatttgtgtcagtctgtaaatggatacttcactttaataactgttgcttagtaattggctttgtagagaagctggaaaaaaatggttttgtcttcaactcctttgcatgccaggcggtgatgtggatctcggcttctgtgagcctgtgctgtgggcagggctgagctggagccgcccctctcagcccgcctgccacggcctttccttaaaggccatccttaaaaccagaccctcatggctaccagcacctgaaagcttcctcgacatctgttaataaagccgtaggcccttgtctaagtgcaaccgcctagactttctttcagatacatgtccacatgtccatttttcaggttctctaagttggagtggagtctgggaagggttgtgaatgaggcttctgggctatgggtgaggttccaatggcaggttagagcccctcgggccaactgccatcctggaaagtagagacagcagtgcccgctgcccagaagagaccagcaagccaaactggagcccccattgcaggctgtcgccatgtggaaagagtaactcacaattgccaataaagtctcatgtggttttatctac

SEQ ID NO: 21 - DNA, 2570 bp, Homo sapiens
gacatgccccgcggcgcgccattaaccgccagatttgaatcgcgggacccgttggcagaggtggcggcggcggcatgggtgccccgacgttgccccctgcctggcagccctttctcaaggaccaccgcatctctacattcaagaactggcccttcttggagggctgcgcctgcaccccggagcggatggccgaggctggcttcatccactgccccactgagaacgagccagacttggcccagtgtttcttctgcttcaaggagctggaaggctgggagccagatgacgaccccatagaggaacataaaaagcattcgtccggttgcgctttcctttctgtcaagaagcagtttgaagaattaacccttggtgaatttttgaaactggacagagaaagagccaagaacaaaattgcaaaggaaaccaacaataagaagaaagaatttgaggaaactgcgaagaaagtgcgccgtgccatcgagcagctggctgccatggattgaggcctctggccggagctgcctggtcccagagtggctgcaccacttccagggtttattccctggtgccaccagccttcctgtgggccccttagcaatgtcttaggaaaggagatcaacattttcaaattagatgtttcaactgtgctcttgttttgtcttgaaagtggcaccagaggtgcttctgcctgtgcagcgggtgctgctggtaacagtggctgcttctctctctctctctcttttttgggggctcatttttgctgttttgattcccgggcttaccaggtgagaagtgagggaggaagaaggcagtgtcccttttgctagagctgacagctttgttcgcgtgggcagagccttccacagtgaatgtgtctggacctcatgttgttgaggctgtcacagtcctgagtgtggacttggcaggtgcctgttgaatctgagctgcaggttccttatctgtcacacctgtgcctcctcagaggacatgtttttttgtttttttttttttggtagatgcatgacttgtgtgtgatgagagaatggagacagagtccctggctcctctactgtttaacaacatggctttcttattttgtttgaattgttaattcacagaatagcacaaactacaattaaaactaagcacaaagccattctaagtcattggggaaacggggtgaacttcaggtggatgaggagacagaatagagtgataggaagcgtctggcagatactccttttgccactgctgtgtgattagacaggcccagtgagccgcggggcacatgctggccgctcctccctcagaaaaaggcagtggcctaaatcctttttaaatgacttggctcgatgctgtgggggactggctgggctgctgcaggccgtgtgtctgtcagcccaaccttcacatctgtcacgttctccacacgggggagagacgcagtccgcccaggtccccgctttctttggaggcagcagctcccgcagggctgaagtctggcgtaagatgatggatttgattcgccctcctccctgtcatagagctgcagggtggattgttacagcttcgctggaaacctctggaggtcatctcggctgttcctgagaaataaaaagcctgtcatttcaaacactgctgtggaccctactgggtttttaaaatattgtcagtttttcatcgtcgtccctagcctgccaacagccatctgcccagacagccgcagtgaggatgagcgtcctggcagagacgcagttgtctctgggcgcttgccagagccacgaaccccagacctgtttgtatcatccgggctccttccgggcagaaacaactgaaaatgcacttcagacccacttatttctgccacatctgagtcggcctgagatagacttttccctctaaactgggagaatatcacagtggtttttgttagcagaaaatgcactccagcctctgtactcatctaagctgcttatttttgatatttgtgtcagtctgtaaatggatacttcactttaataactgttgcttagtaattggctttgtagagaagctggaaaaaaatggttttgtcttcaactcctttgcatgccaggcggtgatgtggatctcggcttctgtgagcctgtgctgtgggcagggctgagctggagccgcccctctcagcccgcctgccacggcctttccttaaaggccatccttaaaaccagaccctcatggctaccagcacctgaaagcttcctcgacatctgttaataaagccgtaggcccttgtctaagtgcaaccgcctagactttctttcagatacatgtccacatgtccatttttcaggttctctaagttggagtggagtctgggaagggttgtgaatgaggcttctgggctatgggtgaggttccaatggcaggttagagcccctcgggccaactgccatcctggaaagtagagacagcagtgcccgctgcccagaagagaccagcaagccaaactggagcccccattgcaggctgtcgccatgtggaaagagtaactcacaattgccaataaagtctcatgtggttttatctac

SEQ ID NO: 22 - DNA, 2639 bp, Homo sapiens
gacatgccccgcggcgcgccattaaccgccagatttgaatcgcgggacccgttggcagaggtggcggcggcggcatgggtgccccgacgttgccccctgcctggcagccctttctcaaggaccaccgcatctctacattcaagaactggcccttcttggagggctgcgcctgcaccccggagcggatggccgaggctggcttcatccactgccccactgagaacgagccagacttggcccagtgtttcttctgcttcaaggagctggaaggctgggagccagatgacgaccccattgggccgggcacggtggcttacgcctgtaataccagcactttgggaggccgaggcgggcggatcacgagagaggaacataaaaagcattcgtccggttgcgctttcctttctgtcaagaagcagtttgaagaattaacccttggtgaatttttgaaactggacagagaaagagccaagaacaaaattgcaaaggaaaccaacaataagaagaaagaatttgaggaaactgcgaagaaagtgcgccgtgccatcgagcagctggctgccatggattgaggcctctggccggagctgcctggtcccagagtggctgcaccacttccagggtttattccctggtgccaccagccttcctgtgggccccttagcaatgtcttaggaaaggagatcaacattttcaaattagatgtttcaactgtgctcttgttttgtcttgaaagtggcaccagaggtgcttctgcctgtgcagcgggtgctgctggtaacagtggctgcttctctctctctctctcttttttgggggctcatttttgctgttttgattcccgggcttaccaggtgagaagtgagggaggaagaaggcagtgtcccttttgctagagctgacagctttgttcgcgtgggcagagccttccacagtgaatgtgtctggacctcatgttgttgaggctgtcacagtcctgagtgtggacttggcaggtgcctgttgaatctgagctgcaggttccttatctgtcacacctgtgcctcctcagaggacatgtttttttgtttttttttttttggtagatgcatgacttgtgtgtgatgagagaatggagacagagtccctggctcctctactgtttaacaacatggctttcttattttgtttgaattgttaattcacagaatagcacaaactacaattaaaactaagcacaaagccattctaagtcattggggaaacggggtgaacttcaggtggatgaggagacagaatagagtgataggaagcgtctggcagatactccttttgccactgctgtgtgattagacaggcccagtgagccgcggggcacatgctggccgctcctccctcagaaaaaggcagtggcctaaatcctttttaaatgacttggctcgatgctgtgggggactggctgggctgctgcaggccgtgtgtctgtcagcccaaccttcacatctgtcacgttctccacacgggggagagacgcagtccgcccaggtccccgctttctttggaggcagcagctcccgcagggctgaagtctggcgtaagatgatggatttgattcgccctcctccctgtcatagagctgcagggtggattgttacagcttcgctggaaacctctggaggtcatctcggctgttcctgagaaataaaaagcctgtcatttcaaacactgctgtggaccctactgggtttttaaaatattgtcagtttttcatcgtcgtccctagcctgccaacagccatctgcccagacagccgcagtgaggatgagcgtcctggcagagacgcagttgtctctgggcgcttgccagagccacgaaccccagacctgtttgtatcatccgggctccttccgggcagaaacaactgaaaatgcacttcagacccacttatttctgccacatctgagtcggcctgagatagacttttccctctaaactgggagaatatcacagtggtttttgttagcagaaaatgcactccagcctctgtactcatctaagctgcttatttttgatatttgtgtcagtctgtaaatggatacttcactttaataactgttgcttagtaattggctttgtagagaagctggaaaaaaatggttttgtcttcaactcctttgcatgccaggcggtgatgtggatctcggcttctgtgagcctgtgctgtgggcagggctgagctggagccgcccctctcagcccgcctgccacggcctttccttaaaggccatccttaaaaccagaccctcatggctaccagcacctgaaagcttcctcgacatctgttaataaagccgtaggcccttgtctaagtgcaaccgcctagactttctttcagatacatgtccacatgtccatttttcaggttctctaagttggagtggagtctgggaagggttgtgaatgaggcttctgggctatgggtgaggttccaatggcaggttagagcccctcgggccaactgccatcctggaaagtagagacagcagtgcccgctgcccagaagagaccagcaagccaaactggagcccccattgcaggctgtcgccatgtggaaagagtaactcacaattgccaataaagtctcatgtggttttatctac

SEQ ID NO: 23 - DNA, 2452 bp, Homo sapiens
gacatgccccgcggcgcgccattaaccgccagatttgaatcgcgggacccgttggcagaggtggcggcggcggcatgggtgccccgacgttgccccctgcctggcagccctttctcaaggaccaccgcatctctacattcaagaactggcccttcttggagggctgcgcctgcaccccggagcggatggccgaggctggcttcatccactgccccactgagaacgagccagacttggcccagtgtttcttctgcttcaaggagctggaaggctgggagccagatgacgaccccatgcaaaggaaaccaacaataagaagaaagaatttgaggaaactgcgaagaaagtgcgccgtgccatcgagcagctggctgccatggattgaggcctctggccggagctgcctggtcccagagtggctgcaccacttccagggtttattccctggtgccaccagccttcctgtgggccccttagcaatgtcttaggaaaggagatcaacattttcaaattagatgtttcaactgtgctcttgttttgtcttgaaagtggcaccagaggtgcttctgcctgtgcagcgggtgctgctggtaacagtggctgcttctctctctctctctcttttttgggggctcatttttgctgttttgattcccgggcttaccaggtgagaagtgagggaggaagaaggcagtgtcccttttgctagagctgacagctttgttcgcgtgggcagagccttccacagtgaatgtgtctggacctcatgttgttgaggctgtcacagtcctgagtgtggacttggcaggtgcctgttgaatctgagctgcaggttccttatctgtcacacctgtgcctcctcagaggacatgtttttttgtttttttttttttggtagatgcatgacttgtgtgtgatgagagaatggagacagagtccctggctcctctactgtttaacaacatggctttcttattttgtttgaattgttaattcacagaatagcacaaactacaattaaaactaagcacaaagccattctaagtcattggggaaacggggtgaacttcaggtggatgaggagacagaatagagtgataggaagcgtctggcagatactccttttgccactgctgtgtgattagacaggcccagtgagccgcggggcacatgctggccgctcctccctcagaaaaaggcagtggcctaaatcctttttaaatgacttggctcgatgctgtgggggactggctgggctgctgcaggccgtgtgtctgtcagcccaaccttcacatctgtcacgttctccacacgggggagagacgcagtccgcccaggtccccgctttctttggaggcagcagctcccgcagggctgaagtctggcgtaagatgatggatttgattcgccctcctccctgtcatagagctgcagggtggattgttacagcttcgctggaaacctctggaggtcatctcggctgttcctgagaaataaaaagcctgtcatttcaaacactgctgtggaccctactgggtttttaaaatattgtcagtttttcatcgtcgtccctagcctgccaacagccatctgcccagacagccgcagtgaggatgagcgtcctggcagagacgcagttgtctctgggcgcttgccagagccacgaaccccagacctgtttgtatcatccgggctccttccgggcagaaacaactgaaaatgcacttcagacccacttatttctgccacatctgagtcggcctgagatagacttttccctctaaactgggagaatatcacagtggtttttgttagcagaaaatgcactccagcctctgtactcatctaagctgcttatttttgatatttgtgtcagtctgtaaatggatacttcactttaataactgttgcttagtaattggctttgtagagaagctggaaaaaaatggttttgtcttcaactcctttgcatgccaggcggtgatgtggatctcggcttctgtgagcctgtgctgtgggcagggctgagctggagccgcccctctcagcccgcctgccacggcctttccttaaaggccatccttaaaaccagaccctcatggctaccagcacctgaaagcttcctcgacatctgttaataaagccgtaggcccttgtctaagtgcaaccgcctagactttctttcagatacatgtccacatgtccatttttcaggttctctaagttggagtggagtctgggaagggttgtgaatgaggcttctgggctatgggtgaggttccaatggcaggttagagcccctcgggccaactgccatcctggaaagtagagacagcagtgcccgctgcccagaagagaccagcaagccaaactggagcccccattgcaggctgtcgccatgtggaaagagtaactcacaattgccaataaagtctcatgtggttttatctac

SEQ ID NO: 24 - DNA, 5832 bp, Homo sapiens
actgagtcccgggaccccgggagagcggtcagtgtgtggtcgctgcgtttcctctgcctgcgccgggcatcacttgcgcgccgcagaaagtccgtctggcagcctggatatcctctcctaccggcacccgcagacgcccctgcagccgcggtcggcgcccgggctccctagccctgtgcgctcaactgtcctgcgctgcggggtgccgcgagttccacctccgcgcctccttctctagacaggcgctgggagaaagaaccggctcccgagttctgggcatttcgcccggctcgaggtgcaggatgcagagcaaggtgctgctggccgtcgccctgtggctctgcgtggagacccgggccgcctctgtgggtttgcctagtgtttctcttgatctgcccaggctcagcatacaaaaagacatacttacaattaaggctaatacaactcttcaaattacttgcaggggacagagggacttggactggctttggcccaataatcagagtggcagtgagcaaagggtggaggtgactgagtgcagcgatggcctcttctgtaagacactcacaattccaaaagtgatcggaaatgacactggagcctacaagtgcttctaccgggaaactgacttggcctcggtcatttatgtctatgttcaagattacagatctccatttattgcttctgttagtgaccaacatggagtcgtgtacattactgagaacaaaaacaaaactgtggtgattccatgtctcgggtccatttcaaatctcaacgtgtcactttgtgcaagatacccagaaaagagatttgttcctgatggtaacagaatttcctgggacagcaagaagggctttactattcccagctacatgatcagctatgctggcatggtcttctgtgaagcaaaaattaatgatgaaagttaccagtctattatgtacatagttgtcgttgtagggtataggatttatgatgtggttctgagtccgtctcatggaattgaactatctgttggagaaaagcttgtcttaaattgtacagcaagaactgaactaaatgtggggattgacttcaactgggaatacccttcttcgaagcatcagcataagaaacttgtaaaccgagacctaaaaacccagtctgggagtgagatgaagaaatttttgagcaccttaactatagatggtgtaacccggagtgaccaaggattgtacacctgtgcagcatccagtgggctgatgaccaagaagaacagcacatttgtcagggtccatgaaaaaccttttgttgcttttggaagtggcatggaatctctggtggaagccacggtgggggagcgtgtcagaatccctgcgaagtaccttggttacccacccccagaaataaaatggtataaaaatggaataccccttgagtccaatcacacaattaaagcggggcatgtactgacgattatggaagtgagtgaaagagacacaggaaattacactgtcatccttaccaatcccatttcaaaggagaagcagagccatgtggtctctctggttgtgtatgtcccaccccagattggtgagaaatctctaatctctcctgtggattcctaccagtacggcaccactcaaacgctgacatgtacggtctatgccattcctcccccgcatcacatccactggtattggcagttggaggaagagtgcgccaacgagcccagccaagctgtctcagtgacaaacccatacccttgtgaagaatggagaagtgtggaggacttccagggaggaaataaaattgaagttaataaaaatcaatttgctctaattgaaggaaaaaacaaaactgtaagtacccttgttatccaagcggcaaatgtgtcagctttgtacaaatgtgaagcggtcaacaaagtcgggagaggagagagggtgatctccttccacgtgaccaggggtcctgaaattactttgcaacctgacatgcagcccactgagcaggagagcgtgtctttgtggtgcactgcagacagatctacgtttgagaacctcacatggtacaagcttggcccacagcctctgccaatccatgtgggagagttgcccacacctgtttgcaagaacttggatactctttggaaattgaatgccaccatgttctctaatagcacaaatgacattttgatcatggagcttaagaatgcatccttgcaggaccaaggagactatgtctgccttgctcaagacaggaagaccaagaaaagacattgcgtggtcaggcagctcacagtcctagagcgtgtggcacccacgatcacaggaaacctggagaatcagacgacaagtattggggaaagcatcgaagtctcatgcacggcatctgggaatccccctccacagatcatgtggtttaaagataatgagacccttgtagaagactcaggcattgtattgaaggatgggaaccggaacctcactatccgcagagtgaggaaggaggacgaaggcctctacacctgccaggcatgcagtgttcttggctgtgcaaaagtggaggcatttttcataatagaaggtgcccaggaaaagacgaacttggaaatcattattctagtaggcacggcggtgattgccatgttcttctggctacttcttgtcatcatcctacggaccgttaagcgggccaatggaggggaactgaagacaggctacttgtccatcgtcatggatccagatgaactcccattggatgaacattgtgaacgactgccttatgatgccagcaaatgggaattccccagagaccggctgaagctaggtaagcctcttggccgtggtgcctttggccaagtgattgaagcagatgcctttggaattgacaagacagcaacttgcaggacagtagcagtcaaaatgttgaaagaaggagcaacacacagtgagcatcgagctctcatgtctgaactcaagatcctcattcatattggtcaccatctcaatgtggtcaaccttctaggtgcctgtaccaagccaggagggccactcatggtgattgtggaattctgcaaatttggaaacctgtccacttacctgaggagcaagagaaatgaatttgtcccctacaagaccaaaggggcacgattccgtcaagggaaagactacgttggagcaatccctgtggatctgaaacggcgcttggacagcatcaccagtagccagagctcagccagctctggatttgtggaggagaagtccctcagtgatgtagaagaagaggaagctcctgaagatctgtataaggacttcctgaccttggagcatctcatctgttacagcttccaagtggctaagggcatggagttcttggcatcgcgaaagtgtatccacagggacctggcggcacgaaatatcctcttatcggagaagaacgtggttaaaatctgtgactttggcttggcccgggatatttataaagatccagattatgtcagaaaaggagatgctcgcctccctttgaaatggatggccccagaaacaatttttgacagagtgtacacaatccagagtgacgtctggtcttttggtgttttgctgtgggaaatattttccttaggtgcttctccatatcctggggtaaagattgatgaagaattttgtaggcgattgaaagaaggaactagaatgagggcccctgattatactacaccagaaatgtaccagaccatgctggactgctggcacggggagcccagtcagagacccacgttttcagagttggtggaacatttgggaaatctcttgcaagctaatgctcagcaggatggcaaagactacattgttcttccgatatcagagactttgagcatggaagaggattctggactctctctgcctacctcacctgtttcctgtatggaggaggaggaagtatgtgaccccaaattccattatgacaacacagcaggaatcagtcagtatctgcagaacagtaagcgaaagagccggcctgtgagtgtaaaaacatttgaagatatcccgttagaagaaccagaagtaaaagtaatcccagatgacaaccagacggacagtggtatggttcttgcctcagaagagctgaaaactttggaagacagaaccaaattatctccatcttttggtggaatggtgcccagcaaaagcagggagtctgtggcatctgaaggctcaaaccagacaagcggctaccagtccggatatcactccgatgacacagacaccaccgtgtactccagtgaggaagcagaacttttaaagctgatagagattggagtgcaaaccggtagcacagcccagattctccagcctgactcggggaccacactgagctctcctcctgtttaaaaggaagcatccacacccccaactcccggacatcacatgagaggtgctgctcagattttcaagtgttgttctttccaccagcaggaagtagccgcatttgattttcatttcgacaacagaaaaaggacctcggactgcagggagccagtcttctaggcatatcctggaagaggcttgtgacccaagaatgtgtctgtgtcttctcccagtgttgacctgatcctctttttcattcatttaaaaagcatttatcatgccccctgctgcgggtctcaccatgggtttagaacaaagacgttcaagaaatggccccatcctcaaagaagtagcagtacctggggagctgacacttctgtaaaactagaagataaaccaggcaatgtaagtgttcgaggtgttgaagatgggaaggatttgcagggctgagtctatccaagaggctttgtttaggacgtgggtcccaagccaagccttaagtgtggaattcggattgatagaaaggaagactaacgttaccttgctttggagagtactggagcctgcaaatgcattgtgtttgctctggtggaggtgggcatggggtctgttctgaaatgtaaagggttcagacggggtttctggttttagaaggttgcgtgttcttcgagttgggctaaagtagagttcgttgtgctgtttctgactcctaatgagagttccttccagaccgttacgtgtctcctggccaagccccaggaaggaaatgatgcagctctggctccttgtctcccaggctgatcctttattcagaataccacaaagaaaggacattcagctcaaggctccctgccgtgttgaagagttctgactgcacaaaccagcttctggtttcttctggaatgaataccctcatatctgtcctgatgtgatatgtctgagactgaatgcgggaggttcaatgtgaagctgtgtgtggtgtcaaagtttcaggaaggattttacccttttgttcttccccctgtccccaacccactctcaccccgcaacccatcagtattttagttatttggcctctactccagtaaacctgattgggtttgttcactctctgaatgattattagccagacttcaaaattattttatagcccaaattataacatctattgtattatttagacttttaacatatagagctatttctactgatttttgcccttgttctgtcctttttttcaaaaaagaaaatgtgttttttgtttggtaccatagtgtgaaatgctgggaacaatgactataagacatgctatggcacatatatttatagtctgtttatgtagaaacaaatgtaatatattaaagccttatatataatgaactttgtactattcacattttgtatcagtattatgtagcataacaaaggtcataatgctttcagcaattgatgtcattttattaaagaacattgaaaaacttga

SEQ ID NO: 25 - DNA, 5200 bp, Homo sapiens
actgagtcccgggaccccgggagagcggtcagtgtgtggtcgctgcgtttcctctgcctgcgccgggcatcacttgcgcgccgcagaaagtccgtctggcagcctggatatcctctcctaccggcacccgcagacgcccctgcagccgcggtcggcgcccgggctccctagccctgtgcgctcaactgtcctgcgctgcggggtgccgcgagttccacctccgcgcctccttctctagacaggcgctgggagaaagaaccggctcccgagttctgggcatttcgcccggctcgaggtgcaggatgcagagcaaggtgctgctggccgtcgccctgtggctctgcgtggagacccgggccgcctctgtgggtttgcctagtgtttctcttgatctgcccaggctcagcatacaaaaagacatacttacaattaaggctaatacaactcttcaaattacttgcaggggacagagggacttggactggctttggcccaataatcagagtggcagtgagcaaagggtggaggtgactgagtgcagcgatggcctcttctgtaagacactcacaattccaaaagtgatcggaaatgacactggagcctacaagtgcttctaccgggaaactgacttggcctcggtcatttatgtctatgttcaagattacagatctccatttattgcttctgttagtgaccaacatggagtcgtgtacattactgagaacaaaaacaaaactgtggtgattccatgtctcgggtccatttcaaatctcaacgtgtcactttgtgcaagatacccagaaaagagatttgttcctgatggtaacagaatttcctgggacagcaagaagggctttactattcccagctacatgatcagctatgctggcatggtcttctgtgaagcaaaaattaatgatgaaagttaccagtctattatgtacatagttgtcgttgtagggtataggatttatgatgtggttctgagtccgtctcatggaattgaactatctgttggagaaaagcttgtcttaaattgtacagcaagaactgaactaaatgtggggattgacttcaactgggaatacccttcttcgaagcatcagcataagaaacttgtaaaccgagacctaaaaacccagtctgggagtgagatgaagaaatttttgagcaccttaactatagatggtgtaacccggagtgaccaaggattgtacacctgtgcagcatccagtgggctgatgaccaagaagaacagcacatttgtcagggtccatgaaaaaccttttgttgcttttggaagtggcatggaatctctggtggaagccacggtgggggagcgtgtcagaatccctgcgaagtaccttggttacccacccccagaaataaaatggtataaaaatggaataccccttgagtccaatcacacaattaaagcggggcatgtactgacgattatggaagtgagtgaaagagacacaggaaattacactgtcatccttaccaatcccatttcaaaggagaagcagagccatgtggtctctctggttgtgtatgtcccaccccagattggtgagaaatctctaatctctcctgtggattcctaccagtacggcaccactcaaacgctgacatgtacggtctatgccattcctcccccgcatcacatccactggtattggcagttggaggaagagtgcgccaacgagcccagccaagctgtctcagtgacaaacccatacccttgtgaagaatggagaagtgtggaggacttccagggaggaaataaaattgaagttaataaaaatcaatttgctctaattgaaggaaaaaacaaaactgtaagtacccttgttatccaagcggcaaatgtgtcagctttgtacaaatgtgaagcggtcaacaaagtcgggagaggagagagggtgatctccttccacgtgaccaggggtcctgaaattactttgcaacctgacatgcagcccactgagcaggagagcgtgtctttgtggtgcactgcagacagatctacgtttgagaacctcacatggtacaagcttggcccacagcctctgccaatccatgtgggagagttgcccacacctgtttgcaagaacttggatactctttggaaattgaatgccaccatgttctctaatagcacaaatgacattttgatcatggagcttaagaatgcatccttgcaggaccaaggagactatgtctgccttgctcaagacaggaagaccaagaaaagacattgcgtggtcaggcagctcacagtcctagagcgtgtggcacccacgatcacaggaaacctggagaatcagacgacaagtattggggaaagcatcgaagtctcatgcacggcatctgggaatccccctccacagatcatgtggtttaaagataatgagacccttgtagaagactcaggcattgtattgaaggatgggaaccggaacctcactatccgcagagtgaggaaggaggacgaaggcctctacacctgccaggcatgcagtgttcttggctgtgcaaaagtggaggcatttttcataatagaaggtgcccaggaaaagacgaacttggaaatcattattctagtaggcacggcggtgattgccatgttcttctggctacttcttgtcatcatcctacggaccgttaagcgggccaatggaggggaactgaagacaggctacttgtccatcgtcatggatccagatgaactcccattggatgaacattgtgaacgactgccttatgatgccagcaaatgggaattccccagagaccggctgaagctaggtaagcctcttggccgtggtgcctttggccaagtgattgaagcagatgcctttggaattgacaagacagcaacttgcaggacagtagcagtcaaaatgttgaaagaaggagcaacacacagtgagcatcgagctctcatgtctgaactcaagatcctcattcatattggtcaccatctcaatgtggtcaaccttctaggtgcctgtaccaagccaggagggccactcatggtgattgtggaattctgcaaatttggaaacctgtccacttacctgaggagcaagagaaatgaatttgtcccctacaagaccaaaggggcacgattccgtcaagggaaagactacgttggagcaatccctgtggatctgaaacggcgcttggacagcatcaccagtagccagagctcagccagctctggatttgtggaggagaagtccctcagtgatgtagaagaagaggaagctcctgaagatctgtataaggacttcctgaccttggagcatctcatctgttacagcttccaagtggctaagggcatggagttcttggcatcgcgaaagtgtatccacagggacctggcggcacgaaatatcctcttatcggagaagaacgtggttaaaatctgtgactttggcttggcccgggatatttataaagatccagattatgtcagaaaaggagatgctcgcctccctttgaaatggatggccccagaaacaatttttgacagagtgtacacaatccagagtgacgtctggtcttttggtgttttgctgtgggaaatattttccttaggtgcttctccatatcctggggtaaagattgatgaagaattttgtaggcgattgaaagaaggaactagaatgagggcccctgattatactacaccagaaatgtaccagaccatgctggactgctggcacggggagcccagtcagagacccacgttttcagagttggtggaacatttgggaaatctcttgcaagctaatgctcagcaggatggcaaagactacattgttcttccgatatcagagactttgagcatggaagaggattctggactctctctgcctacctcacctgtttcctgtatggaggaggaggaagtatgtgaccccaaattccattatgacaacacagcaggaatcagtcagtatctgcagaacagtaagcgaaagagccggcctgtgagtgtaaaaacatttgaagatatcccgttagaagaaccagaagtaaaagtaatcccagatgacaaccagacggacagtggtatggttcttgcctcagaagagctgaaaactttggaagacagaaccaaattatctccatcttttggtggaatggtgcccagcaaaagcagggagtctgtggcatctgaaggctcaaaccagacaagcggctaccagtccggatatcactccgatgacacagacaccaccgtgtactccagtgaggaagcagaacttttaaagctgatagagattggagtgcaaaccggtagcacagcccagattctccagcctgactcggggaccacactgagctctcctcctgtttaaaaggaagcatccacacccccaactcccggacatcacatgagaggtgctgctcagattttcaagtgttgttctttccaccagcaggaagtagccgcatttgattttcatttcgacaacaaacaaagacgttcaagaaatggccccatcctcaaagaagtagcagtacctggggagctgacacttctgtaaaactagaagataaaccaggcaatgtaagtgttcgaggtgttgaagatgggaaggatttgcagggctgagtctatccaagaggctttgtttaggacgtgggtcccaagccaagccttaagtgtggaattcggattgatagaaaggaagactaacgttaccttgctttggagagtactggagcctgcaaatgcattgtgtttgctctggtggaggtgggcatggggtctgttctgaaatgtaaagggttcagacggggtttctggttttagaaggttgcgtgttcttcgagttgggctaaagtagagttcgttgtgctgtttctgactcctaatgagagttccttccagaccgttacgtgtctcctggccaagccccaggaaggaaatgatgcagctctggctccttgtctcccaggctgatcctttattcagaataccacaaagaaaggacattcagctcaaggctccctgccgtgttgaagagttctgactgcacaaaccagcttctggtttcttctggaatgaataccctcatatctgtcctgatgtgatatgtctgagactgaatgcgggaggttcaatgtgaagctgtgtgtggtgtcaaagtttcaggaaggattttacccttttgttcttccc

SEQ ID NO: 26 - DNA, 5050 bp, Homo sapiens
actgagtcccgggaccccgggagagcggtcagtgtgtggtcgctgcgtttcctctgcctgcgccgggcatcacttgcgcgccgcagaaagtccgtctggcagcctggatatcctctcctaccggcacccgcagacgcccctgcagccgcggtcggcgcccgggctccctagccctgtgcgctcaactgtcctgcgctgcggggtgccgcgagttccacctccgcgcctccttctctagacaggcgctgggagaaagaaccggctcccgagttctgggcatttcgcccggctcgaggtgcaggatgcagagcaaggtgctgctggccgtcgccctgtggctctgcgtggagacccgggccgcctctgtgggtttgcctagtgtttctcttgatctgcccaggctcagcatacaaaaagacatacttacaattaaggctaatacaactcttcaaattacttgcaggggacagagggacttggactggctttggcccaataatcagagtggcagtgagcaaagggtggaggtgactgagtgcagcgatggcctcttctgtaagacactcacaattccaaaagtgatcggaaatgacactggagcctacaagtgcttctaccgggaaactgacttggcctcggtcatttatgtctatgttcaagattacagatctccatttattgcttctgttagtgaccaacatggagtcgtgtacattactgagaacaaaaacaaaactgtggtgattccatgtctcgggtccatttcaaatctcaacgtgtcactttgtgcaagatacccagaaaagagatttgttcctgatggtaacagaatttcctgggacagcaagaagggctttactattcccagctacatgatcagctatgctggcatggtcttctgtgaagcaaaaattaatgatgaaagttaccagtctattatgtacatagttgtcgttgtagggtataggatttatgatgtggttctgagtccgtctcatggaattgaactatctgttggagaaaagcttgtcttaaattgtacagcaagaactgaactaaatgtggggattgacttcaactgggaatacccttcttcgaagcatcagcataagaaacttgtaaaccgagacctaaaaacccagtctgggagtgagatgaagaaatttttgagcaccttaactatagatggtgtaacccggagtgaccaaggattgtacacctgtgcagcatccagtgggctgatgaccaagaagaacagcacatttgtcagggtccatgaaaaaccttttgttgcttttggaagtggcatggaatctctggtggaagccacggtgggggagcgtgtcagaatccctgcgaagtaccttggttacccacccccagaaataaaatggtataaaaatggaataccccttgagtccaatcacacaattaaagcggggcatgtactgacgattatggaagtgagtgaaagagacacaggaaattacactgtcatccttaccaatcccatttcaaaggagaagcagagccatgtggtctctctggttgtgtatgtcccaccccagattggtgagaaatctctaatctctcctgtggattcctaccagtacggcaccactcaaacgctgacatgtacggtctatgccattcctcccccgcatcacatccactggtattggcagttggaggaagagtgcgccaacgagcccagccaagctgtctcagtgacaaacccatacccttgtgaagaatggagaagtgtggaggacttccagggaggaaataaaattgaagttaataaaaatcaatttgctctaattgaaggaaaaaacaaaactgtaagtacccttgttatccaagcggcaaatgtgtcagctttgtacaaatgtgaagcggtcaacaaagtcgggagaggagagagggtgatctccttccacgtgaccaggggtcctgaaattactttgcaacctgacatgcagcccactgagcaggagagcgtgtctttgtggtgcactgcagacagatctacgtttgagaacctcacatggtacaagcttggcccacagcctctgccaatccatgtgggagagttgcccacacctgtttgcaagaacttggatactctttggaaattgaatgccaccatgttctctaatagcacaaatgacattttgatcatggagcttaagaatgcatccttgcaggaccaaggagactatgtctgccttgctcaagacaggaagaccaagaaaagacattgcgtggtcaggcagctcacagtcctagagcgtgtggcacccacgatcacaggaaacctggagaatcagacgacaagtattggggaaagcatcgaagtctcatgcacggcatctgggaatccccctccacagatcatgtggtttaaagataatgagacccttgtagaagactcaggcattgtattgaaggatgggaaccggaacctcactatccgcagagtgaggaaggaggacgaaggcctctacacctgccaggcatgcagtgttcttggctgtgcaaaagtggaggcatttttcataatagaaggtgcccaggaaaagacgaacttggaaatcattattctagtaggcacggcggtgattgccatgttcttctggctacttcttgtcatcatcctacggaccgttaagcgggccaatggaggggaactgaagacaggctacttgtccatcgtcatggatccagatgaactcccattggatgaacattgtgaacgactgccttatgatgccagcaaatgggaattccccagagaccggctgaagctaggtaagcctcttggccgtggtgcctttggccaagtgattgaagcagatgcctttggaattgacaagacagcaacttgcaggacagtagcagtcaaaatgttgaaagaaggagcaacacacagtgagcatcgagctctcatgtctgaactcaagatcctcattcatattggtcaccatctcaatgtggtcaaccttctaggtgcctgtaccaagccaggagggccactcatggtgattgtggaattctgcaaatttggaaacctgtccacttacctgaggagcaagagaaatgaatttgtcccctacaaggtatctcctgaagatctgtataaggacttcctgaccttggagcatctcatctgttacagcttccaagtggctaagggcatggagttcttggcatcgcgaaagtgtatccacagggacctggcggcacgaaatatcctcttatcggagaagaacgtggttaaaatctgtgactttggcttggcccgggatatttataaagatccagattatgtcagaaaaggagatgctcgcctccctttgaaatggatggccccagaaacaatttttgacagagtgtacacaatccagagtgacgtctggtcttttggtgttttgctgtgggaaatattttccttaggtgcttctccatatcctggggtaaagattgatgaagaattttgtaggcgattgaaagaaggaactagaatgagggcccctgattatactacaccagaaatgtaccagaccatgctggactgctggcacggggagcccagtcagagacccacgttttcagagttggtggaacatttgggaaatctcttgcaagctaatgctcagcaggatggcaaagactacattgttcttccgatatcagagactttgagcatggaagaggattctggactctctctgcctacctcacctgtttcctgtatggaggaggaggaagtatgtgaccccaaattccattatgacaacacagcaggaatcagtcagtatctgcagaacagtaagcgaaagagccggcctgtgagtgtaaaaacatttgaagatatcccgttagaagaaccagaagtaaaagtaatcccagatgacaaccagacggacagtggtatggttcttgcctcagaagagctgaaaactttggaagacagaaccaaattatctccatcttttggtggaatggtgcccagcaaaagcagggagtctgtggcatctgaaggctcaaaccagacaagcggctaccagtccggatatcactccgatgacacagacaccaccgtgtactccagtgaggaagcagaacttttaaagctgatagagattggagtgcaaaccggtagcacagcccagattctccagcctgactcggggaccacactgagctctcctcctgtttaaaaggaagcatccacacccccaactcccggacatcacatgagaggtgctgctcagattttcaagtgttgttctttccaccagcaggaagtagccgcatttgattttcatttcgacaacaaacaaagacgttcaagaaatggccccatcctcaaagaagtagcagtacctggggagctgacacttctgtaaaactagaagataaaccaggcaatgtaagtgttcgaggtgttgaagatgggaaggatttgcagggctgagtctatccaagaggctttgtttaggacgtgggtcccaagccaagccttaagtgtggaattcggattgatagaaaggaagactaacgttaccttgctttggagagtactggagcctgcaaatgcattgtgtttgctctggtggaggtgggcatggggtctgttctgaaatgtaaagggttcagacggggtttctggttttagaaggttgcgtgttcttcgagttgggctaaagtagagttcgttgtgctgtttctgactcctaatgagagttccttccagaccgttacgtgtctcctggccaagccccaggaaggaaatgatgcagctctggctccttgtctcccaggctgatcctttattcagaataccacaaagaaaggacattcagctcaaggctccctgccgtgttgaagagttctgactgcacaaaccagcttctggtttcttctggaatgaataccctcatatctgtcctgatgtgatatgtctgagactgaatgcgggaggttcaatgtgaagctgtgtgtggtgtcaaagtttcaggaaggattttacccttttgttcttccc

SEQ ID NO: 27 - DNA, 4663 bp, Homo sapiens
cctgctcctgctcctccgctcctcctgcgcggggtgctgaaacagcccggggaagtagagccgcctccggggagcccaaccagccgaacgccgccggcgtcagcagccttgcgcggccacagcatgaccgctcgcggcctggcccttggcctcctcctgctgctactgtgtccagcgcaggtgttttcacagtcctgtgtttggtatggagagtgtggaattgcatatggggacaagaggtacaattgcgaatattctggcccaccaaaaccattgccaaaggatggatatgacttagtgcaggaactctgtccaggattcttctttggcaatgtcagtctctgttgtgatgttcggcagcttcagacactaaaagacaacctgcagctgcctctacagtttctgtccagatgtccatcctgtttttataacctactgaacctgttttgtgagctgacatgtagccctcgacagagtcagtttttgaatgttacagctactgaagattatgttgatcctgttacaaaccagacgaaaacaaatgtgaaagagttacaatactacgtcggacagagttttgccaatgcaatgtacaatgcctgccgggatgtggaggccccctcaagtaatgacaaggccctgggactcctgtgtgggaaggacgctgacgcctgtaatgccaccaactggattgaatacatgttcaataaggacaatggacaggcaccttttaccatcactcctgtgttttcagattttccagtccatgggatggagcccatgaacaatgccaccaaaggctgtgacgagtctgtggatgaggtcacagcaccatgtagctgccaagactgctctattgtctgtggccccaagccccagcccccacctcctcctgctccctggacgatccttggcttggacgccatgtatgtcatcatgtggatcacctacatggcgtttttgcttgtgttttttggagcattttttgcagtgtggtgctacagaaaacggtattttgtctccgagtacactcccatcgatagcaatatagctttttctgttaatgcaagtgacaaaggagaggcgtcctgctgtgaccctgtcagcgcagcatttgagggctgcttgaggcggctgttcacacgctgggggtctttctgcgtccgaaaccctggctgtgtcattttcttctcgctggtcttcattactgcgtgttcgtcaggcctggtgtttgtccgggtcacaaccaatccagttgacctctggtcagcccccagcagccaggctcgcctggaaaaagagtactttgaccagcactttgggcctttcttccggacggagcagctcatcatccgggcccctctcactgacaaacacatttaccagccatacccttcgggagctgatgtaccctttggacctccgcttgacatacagatactgcaccaggttcttgacttacaaatagccatcgaaaacattactgcctcttatgacaatgagactgtgacacttcaagacatctgcttggcccctctttcaccgtataacacgaactgcaccattttgagtgtgttaaattacttccagaacagccattccgtgctggaccacaagaaaggggacgacttctttgtgtatgccgattaccacacgcactttctgtactgcgtacgggctcctgcctctctgaatgatacaagtttgctccatgacccttgtctgggtacgtttggtggaccagtgttcccgtggcttgtgttgggaggctatgatgatcaaaactacaataacgccactgcccttgtgattaccttccctgtcaataattactataatgatacagagaagctccagagggcccaggcctgggaaaaagagtttattaattttgtgaaaaactacaagaatcccaatctgaccatttccttcactgctgaacgaagtattgaagatgaactaaatcgtgaaagtgacagtgatgtcttcaccgttgtaattagctatgccatcatgtttctatatatttccctagccttggggcacatcaaaagctgtcgcaggcttctggtggattcgaaggtctcactaggcatcgcgggcatcttgatcgtgctgagctcggtggcttgctccttgggtgtcttcagctacattgggttgcccttgaccctcattgtgattgaagtcatcccgttcctggtgctggctgttggagtggacaacatcttcattctggtgcaggcctaccagagagatgaacgtcttcaaggggaaaccctggatcagcagctgggcagggtcctaggagaagtggctcccagtatgttcctgtcatccttttctgagactgtagcatttttcttaggagcattgtccgtgatgccagccgtgcacaccttctctctctttgcgggattggcagtcttcattgactttcttctgcagattacctgtttcgtgagtctcttggggttagacattaaacgtcaagagaaaaatcggctagacatcttttgctgtgtcagaggtgctgaagatggaacaagcgtccaggcctcagagagctgtttgtttcgcttcttcaaaaactcctattctccacttctgctaaaggactggatgagaccaattgtgatagcaatatttgtgggtgttctgtcattcagcatcgcagtcctgaacaaagtagatattggattggatcagtctctttcgatgccagatgactcctacatggtggattatttcaaatccatcagtcagtacctgcatgcgggtccgcctgtgtactttgtcctggaggaagggcacgactacacttcttccaaggggcagaacatggtgtgcggcggcatgggctgcaacaatgattccctggtgcagcagatatttaacgcggcgcagctggacaactatacccgaataggcttcgccccctcgtcctggatcgacgattatttcgactgggtgaagccacagtcgtcttgctgtcgagtggacaatatcactgaccagttctgcaatgcttcagtggttgaccctgcctgcgttcgctgcaggcctctgactccggaaggcaaacagaggcctcaggggggagacttcatgagattcctgcccatgttcctttcggataaccctaaccccaagtgtggcaaagggggacatgctgcctatagttctgcagttaacatcctccttggccatggcaccagggtcggagccacgtacttcatgacctaccacaccgtgctgcagacctctgctgactttattgacgctctgaagaaagcccgacttatagccagtaatgtcaccgaaaccatgggcattaacggcagtgcctaccgagtatttccttacagtgtgttttatgtcttctacgaacagtacctgaccatcattgacgacactatcttcaacctcggtgtgtccctgggcgcgatatttctggtgaccatggtcctcctgggctgtgagctctggtctgcagtcatcatgtgtgccaccatcgccatggtcttggtcaacatgtttggagttatgtggctctggggcatcagtctgaacgctgtatccttggtcaacctggtgatgagctgtggcatctccgtggagttctgcagccacataaccagagcgttcacggtgagcatgaaaggcagccgcgtggagcgcgcggaagaggcacttgcccacatgggcagctccgtgttcagtggaatcacacttacaaaatttggagggattgtggtgttggcttttgccaaatctcaaattttccagatattctacttcaggatgtatttggccatggtcttactgggagccactcacggattaatatttctccctgtcttactcagttacatagggccatcagtaaataaagccaaaagttgtgccactgaagagcgatacaaaggaacagagcgcgaacggcttctaaatttctagccctctcgcagggcatcctgactgaactgtgtctaagggtcggtcggtttaccactggacgggtgctgcatcggcaaggccaagttgaacaccggatggtgccaaccatcggttgtttggcagcagctttgaacgtagcgcctgtgaactcaggaatgcacagttgacttgggaagcagtattactagatctggaggcaaccacaggacactaaacttctcccagcctcttcaggaaagaaacctcattctttggcaagcaggaggtgacactagatggctgtgaatgtgatccgctcactgacactctgtaaaggccaatcaatgcactgtctgtctctccttttaggagtaagccatcccacaagttctataccatatttttagtgacagttgaggttgtagatacactttataacattttatagtttaaagagctttattaatgcaataaattaactttgtacacatttttatataaaaaaacagcaagtgatttcagaatgttgtaggcctcattagagcttggtctccaaaaatctgtttgaaaaaagcaacatgttcttcacagtgttcccctagaaaggaagagatttaattgccagttagatgtggcatgaaatgagggacaaagaaagcatctcgtaggtgtgtctactgggttttaacttatttttctttaataaaatacattgttttcctaa

SEQ ID NO: 28 - DNA, 1507 bp, Homo sapiens
tcccagcccacgattcccctgacccgactccctttcccagaactcagtcgcctgaacccccagcctgtggttctctcctaggcctcagcctttcctgcctttgactgaaacagcagtatcttctaagccctgggggcttccccgggccccagccccgacctagaacccgcccgctgcctgccacgctgccactgccgcttcctctataaagggacctgagcgtccgggcccaggggctccgcacagcaggttctccccatgacaccacctgaacgtctcttcctcccaagggtgtgtggcaccaccctacacctcctccttctggggctgctgctggttctgctgcctggggcccaggggctccctggtgttggcctcacaccttcagctgcccagactgcccgtcagcaccccaagatgcatcttgcccacagcaccctcaaacctgctgctcacctcattggagaccccagcaagcagaactcactgctctggagagcaaacacggaccgtgccttcctccaggatggtttctccttgagcaacaattctctcctggtccccaccagtggcatctacttcgtctactcccaggtggtcttctctgggaaagcctactctcccaaggccacctcctccccactctacctggcccatgaggtccagctcttctcctcccagtaccccttccatgtgcctctcctcagctcccagaagatggtgtatccagggctgcaggaaccctggctgcactcgatgtaccacggggctgcgttccagctcacccagggagaccagctatccacccacacagatggcatcccccacctagtcctcagccctagtactgtcttctttggagccttcgctctgtagaacttggaaaaatccagaaagaaaaaataattgatttcaagaccttctccccattctgcctccattctgaccatttcaggggtcgtcaccacctctcctttggccattccaacagctcaagtcttccctgatcaagtcaccggagctttcaaagaaggaattctaggcatcccaggggaccacacctccctgaaccatccctgatgtctgtctggctgaggatttcaagcctgcctaggaattcccagcccaaagctgttggtctgtcccaccagctaggtggggcctagatccacacacagaggaagagcaggcacatggaggagcttgggggatgactagaggcagggaggggactatttatgaaggcaaaaaaattaaattatttatttatggaggatggagagaggggaataatagaagaacatccaaggagaaacagagacaggcccaagagatgaagagtgagagggcatgcgcacaaggctgaccaagagagaaagaagtaggcatgagggatcacagggccccagaaggcagggaaaggctctgaaagccagctgccgaccagagccccacacggaggcatctgcaccctcgatgaagcccaataaacctcttttctctgaaa

SEQ ID NO: 29 - DNA, 1416 bp, Homo sapiens
gctccgcacagcaggtgaggctctcctgccccatctccttgggctgcccgtgcttcgtgctttggactaccgcccagcagtgtcctgccctctgcctgggcctcggtccctcctgcacctgctgcctggatccccggcctgcctgggcctgggccttggttctccccatgacaccacctgaacgtctcttcctcccaagggtgtgtggcaccaccctacacctcctccttctggggctgctgctggttctgctgcctggggcccaggggctccctggtgttggcctcacaccttcagctgcccagactgcccgtcagcaccccaagatgcatcttgcccacagcaccctcaaacctgctgctcacctcattggagaccccagcaagcagaactcactgctctggagagcaaacacggaccgtgccttcctccaggatggtttctccttgagcaacaattctctcctggtccccaccagtggcatctacttcgtctactcccaggtggtcttctctgggaaagcctactctcccaaggccacctcctccccactctacctggcccatgaggtccagctcttctcctcccagtaccccttccatgtgcctctcctcagctcccagaagatggtgtatccagggctgcaggaaccctggctgcactcgatgtaccacggggctgcgttccagctcacccagggagaccagctatccacccacacagatggcatcccccacctagtcctcagccctagtactgtcttctttggagccttcgctctgtagaacttggaaaaatccagaaagaaaaaataattgatttcaagaccttctccccattctgcctccattctgaccatttcaggggtcgtcaccacctctcctttggccattccaacagctcaagtcttccctgatcaagtcaccggagctttcaaagaaggaattctaggcatcccaggggaccacacctccctgaaccatccctgatgtctgtctggctgaggatttcaagcctgcctaggaattcccagcccaaagctgttggtctgtcccaccagctaggtggggcctagatccacacacagaggaagagcaggcacatggaggagcttgggggatgactagaggcagggaggggactatttatgaaggcaaaaaaattaaattatttatttatggaggatggagagaggggaataatagaagaacatccaaggagaaacagagacaggcccaagagatgaagagtgagagggcatgcgcacaaggctgaccaagagagaaagaagtaggcatgagggatcacagggccccagaaggcagggaaaggctctgaaagccagctgccgaccagagccccacacggaggcatctgcaccctcgatgaagcccaataaacctcttttctctgaaa

SEQ ID NO: 30 - protein, 2201 aa, Homo sapiens [sequence omitted]

SEQ ID NO: 31 - protein, 2261 aa, Homo sapiens [sequence omitted]

SEQ ID NO: 32 - protein, 2201 aa, Homo sapiens [sequence omitted]

SEQ ID NO: 33 - protein, 252 aa, Homo sapiens
MACWPQLRLLLWKNLTFRRRQTCQLLLEVAWPLFIFLILISVRLSYPPYEQHECHFPNKAMPSAGTLPWVQGIICNANNPCFRYPTPGEAPGVVGNFNKSIVARLFSDARRLLLYSQKDTSMKDMRKVLRTLQQIKKSSSNLKLQDFLVDNETFSGFLYHNLSLPKSTVDKMLRADVILHKVFLQGYQLHLTSLCNGSKSEEMIQLGDQEVSELCGLPREKLAAAERVLRSNMDILKPILVSRLAHWRNFKH

SEQ ID NO: 34 - protein, 363 aa, Homo sapiens
MACWPQLRLLLWKNLTFRRRQTCQLLLEVAWPLFIFLILISVRLSYPPYEQHECHFPNKAMPSAGTLPWVQGIICNANNPCFRYPTPGEAPGVVGNFNKSIVARLFSDARRLLLYSQKDTSMKDMRKVLRTLQQIKKSSSNLKLQDFLVDNETFSGFLYHNLSLPKSTVDKMLRADVILHKVFLQGYQLHLTSLCNGSKSEEMIQLGDQEVSELCGLPREKLAAAERVLRSNMDILKPILMDVTCDDIAHGQLTVPRSAAVAATGDAKPNMMGRETLLSICASVPKVEFHERHILKHFSFCVCVSVSLFPAKGIVSFSWASFRIWVLWKAVFWQHGESMAVWEGQLGLGLNIAFEYFTSIDVG

SEQ ID NO: 35 - protein, 738 aa, Homo sapiens
MQPRWAQGATMWLGVLLTLLLCSSLEGQENSFTINSVDMKSLPDWTVQNGKNLTLQCFADVSTTSHVKPQHQMLFYKDDVLFYNISSMKSTESYFIPEVRIYDSGTYKCTVIVNNKEKTTAEYQVLVEGVPSPRVTLDKKEAIQGGIVRVNCSVPEEKAPIHFTIEKLELNEKMVKLKREKNSRDQNFVILEFPVEEQDRVLSFRCQARIISGIHMQTSESTKSELVTVTESFSTPKFHISPTGMIMEGAQLHIKCTIQVTHLAQEFPEIIIQKDKAIVAHNRHGNKAVYSVMAMVEHSGNYTCKVESSRISKVSSIVVNITELFSKPELESSFTHLDQGERLNLSCSIPGAPPANFTIQKEDTIVSQTQDFTKIASKSDSGTYICTAGIDKVVKKSNTVQIVVCEMLSQPRISYDAQFEVIKGQTIEVRCESISGTLPISYQLLKTSKVLENSTKNSNDPAVFKDNPTEDVEYQCVADNCHSHAKMLSEVLRVKVIAPVDEVQISILSSKVVESGEDIVLQCAVNEGSGPITYKFYREKEGKPFYQMTSNATQAFWTKQKANKEQEGEYYCTAFNRANHASSVPRSKILTVRVILAPWKKGLIAVVIIGVIIALLIIAAKCYFLRKAKAKQMPVEMSRPAVPLLNSNNEKMSDPNMEANSHYGHNDDVGNHAMKPINDNKEPLNSDVQYTEVQVSSAESHKDLGKKDTETVYSEVRKAVPDAVESRYSRTEGSLDGT

SEQ ID NO: 36 - protein, 738 aa, Homo sapiens; identical to SEQ ID NO: 35

SEQ ID NO: 37 - protein, 2386 aa, Homo sapiens [sequence omitted]

SEQ ID NO: 38 - protein, 1348 aa, Homo sapiens [sequence omitted]

SEQ ID NO: 39 - protein, 2355 aa, Homo sapiens [sequence omitted]

SEQ ID NO: 40 - protein, 2355 aa, Homo sapiens [sequence omitted]

SEQ ID NO: 41 - protein, 1286 aa, Homo sapiens
MWTPPESAVTGYRVDVIPVNLPGEHGQRLPISRNTFAEVTGLSPGVTYYFKVFAVSHGRESKPLTAQQTTKLDAPTNLQFVNETDSTVLVRWTPPRAQITGYRLTVGLTRRGQPRQYNVGPSVSKYPLRNLQPASEYTVSLVAIKGNQESPKATGVFTTLQPGSSIPPYNTEVTETTIVITWTPAPRIGFKLGVRPSQGGEAPREVTSDSGSIVVSGLTPGVEYVYTIQVLRDGQERDAPIVNKVVTPLSPPTNLHLEANPDTGVLTVSWERSTTPDITGYRITTTPTNGQQGNSLEEVVHADQSSCTFDNLSPGLEYNVSVYTVKDDKESVPISDTIIPAVPPPTDLRFTNIGPDTMRVTWAPPPSIDLTNFLVRYSPVKNEEDVAELSISPSDNAVVLTNLLPGTEYVVSVSSVYEQHESTPLRGRQKTGLDSPTGIDFSDITANSFTVHWIAPRATITGYRIRHHPEHFSGRPREDRVPHSRNSITLTNLTPGTEYVVSIVALNGREESPLLIGQQSTVSDVPRDLEVVAATPTSLLISWDAPAVTVRYYRITYGETGGNSPVQEFTVPGSKSTATISGLKPGVDYTITVYAVTGRGDSPASSKPISINYRTEIDKPSQMQVTDVQDNSISVKWLPSSSPVTGYRVTTTPKNGPGPTKTKTAGPDQTEMTIEGLQPTVEYVVSVYAQNPSGESQPLVQTAVTNIDRPKGLAFTDVDVDSIKIAWESPQGQVSRYRVTYSSPEDGIHELFPAPDGEEDTAELQGLRPGSEYTVSVVALHDDMESQPLIGTQSTAIPAPTDLKFTQVTPTSLSAQWTPPNVQLTGYRVRVTPKEKTGPMKEINLAPDSSSVVVSGLMVATKYEVSVYALKDTLTSRPAQGVVTTLENVSPPRRARVTDATETTITISWRTKTETITGFQVDAVPANGQTPIQRTIKPDVRSYTITGLQPGTDYKIYLYTLNDNARSSPVVIDASTAIDAPSNLRFLATTPNSLLVSWQPPRARITGYIIKYEKPGSPPREVVPRPRPGVTEATITGLEPGTEYTIYVIALKNNQKSEPLIGRKKTGQEALSQTTISWAPFQDTSEYIISCHPVGTDEEPLQFRVPGTSTSATLTGLTRGATYNIIVEALKDQQRHKVREEVVTVGNSGWCHDNGVNYKIGEKWDRQGENGQMMSCTCLGNGKGEFKCDPHEATCYDDGKTYHVGEQWQKEYLGAICSCTCFGGQRGWRCDNCRRPGGEPSPEGTTGQSYNQYSQRYHQRTNTNVNCPIECFMPLDVQADREDSRE

SEQ ID NO: 42 - protein, 693 aa, Homo sapiens [sequence omitted]

SEQ ID NO: 43 - protein, 1341 aa, Homo sapiens
MWTPPESAVTGYRVDVIPVNLPGEHGQRLPISRNTFAEVTGLSPGVTYYFKVFAVSHGRESKPLTAQQTTKLDAPTNLQFVNETDSTVLVRWTPPRAQITGYRLTVGLTRRGQPRQYNVGPSVSKYPLRNLQPASEYTVSLVAIKGNQESPKATGVFTTLQPGSSIPPYNTEVTETTIVITWTPAPRIGFKLGVRPSQGGEAPREVTSDSGSIVVSGLTPGVEYVYTIQVLRDGQERDAPIVNKVVTPLSPPTNLHLEANPDTGVLTVSWERSTTPDITGYRITTTPTNGQQGNSLEEVVHADQSSCTFDNLSPGLEYNVSVYTVKDDKESVPISDTIIPAVPPPTDLRFTNIGPDTMRVTWAPPPSIDLTNFLVRYSPVKNEEDVAELSISPSDNAVVLTNLLPGTEYVVSVSSVYEQHESTPLRGRQKTGLDSPTGIDFSDITANSFTVHWIAPRATITGYRIRHHPEHFSGRPREDRVPHSRNSITLTNLTPGTEYVVSIVALNGREESPLLIGQQSTVSDVPRDLEVVAATPTSLLISWDAPAVTVRYYRITYGETGGNSPVQEFTVPGSKSTATISGLKPGVDYTITVYAVTGRGDSPASSKPISINYRTEIDKPSQMQVTDVQDNSISVKWLPSSSPVTGYRVTTTPKNGPGPTKTKTAGPDQTEMTIEGLQPTVEYVVSVYAQNPSGESQPLVQTAVTNIDRPKGLAFTDVDVDSIKIAWESPQGQVSRYRVTYSSPEDGIHELFPAPDGEEDTAELQGLRPGSEYTVSVVALHDDMESQPLIGTQSTAIPAPTDLKFTQVTPTSLSAQWTPPNVQLTGYRVRVTPKEKTGPMKEINLAPDSSSVVVSGLMVATKYEVSVYALKDTLTSRPAQGVVTTLENVSPPRRARVTDATETTITISWRTKTETITGFQVDAVPANGQTPIQRTIKPDVRSYTITGLQPGTDYKIYLYTLNDNARSSPVVIDASTAIDAPSNLRFLATTPNSLLVSWQPPRARITGYIIKYEKPGSPPREVVPRPRPGVTEATITGLEPGTEYTIYVIALKNNQKSEPLIGRKKTGQEALSQTTISWAPFQDTSEYIISCHPVGTDEEPLQFRVPGTSTSATLTGLTRGATYNIIVEALKDQQRHKVREEVVTVGNSVNEGLNQPTDDSCFDPYTVSHYAVGDEWERMSESGFKLLCQCLGFGSGHFRCDSSRWCHDNGVNYKIGEKWDRQGENGQMMSCTCLGNGKGEFKCDPHEATCYDDGKTYHVGEQWQKEYLGAICSCTCFGGQRGWRCDNCRRPGGEPSPEGTTGQSYNQYSQRYHQRTNTNVNCPIECFMPLDVQADREDSRE

SEQ ID NO: 44 - protein, 1315 aa, Homo sapiens
MWTPPESAVTGYRVDVIPVNLPGEHGQRLPISRNTFAEVTGLSPGVTYYFKVFAVSHGRESKPLTAQQTTKLDAPTNLQFVNETDSTVLVRWTPPRAQITGYRLTVGLTRRGQPRQYNVGPSVSKYPLRNLQPASEYTVSLVAIKGNQESPKATGVFTTLQPGSSIPPYNTEVTETTIVITWTPAPRIGFKLGVRPSQGGEAPREVTSDSGSIVVSGLTPGVEYVYTIQVLRDGQERDAPIVNKVVTPLSPPTNLHLEANPDTGVLTVSWERSTTPDITGYRITTTPTNGQQGNSLEEVVHADQSSCTFDNLSPGLEYNVSVYTVKDDKESVPISDTIIPAVPPPTDLRFTNIGPDTMRVTWAPPPSIDLTNFLVRYSPVKNEEDVAELSISPSDNAVVLTNLLPGTEYVVSVSSVYEQHESTPLRGRQKTGLDSPTGIDFSDITANSFTVHWIAPRATITGYRIRHHPEHFSGRPREDRVPHSRNSITLTNLTPGTEYVVSIVALNGREESPLLIGQQSTVSDVPRDLEVVAATPTSLLISWDAPAVTVRYYRITYGETGGNSPVQEFTVPGSKSTATISGLKPGVDYTITVYAVTGRGDSPASSKPISINYRTEIDKPSQMQVTDVQDNSISVKWLPSSSPVTGYRVTTTPKNGPGPTKTKTAGPDQTEMTIEGLQPTVEYVVSVYAQNPSGESQPLVQTAVTTIPAPTDLKFTQVTPTSLSAQWTPPNVQLTGYRVRVTPKEKTGPMKEINLAPDSSSVVVSGLMVATKYEVSVYALKDTLTSRPAQGVVTTLENVSPPRRARVTDATETTITISWRTKTETITGFQVDAVPANGQTPIQRTIKPDVRSYTITGLQPGTDYKIYLYTLNDNARSSPVVIDASTAIDAPSNLRFLATTPNSLLVSWQPPRARITGYIIKYEKPGSPPREVVPRPRPGVTEATITGLEPGTEYTIYVIALKNNQKSEPLIGRKKTVQKTPFVTHPGYDTGNGIQLPGTSGQQPSVGQQMIFEEHGFRRTTPPTTATPIRHRPRPYPPNVGQEALSQTTISWAPFQDTSEYIISCHPVGTDEEPLQFRVPGTSTSATLTGLTRGATYNIIVEALKDQQRHKVREEVVTVGNSVNEGLNQPTDDSCFDPYTVSHYAVGDEWERMSESGFKLLCQCLGFGSGHFRCDSSRWCHDNGVNYKIGEKWDRQGENGQMMSCTCLGNGKGEFKCDPHEATCYDDGKTYHVGEQWQKEYLGAICSCTCFGGQRGWRCDNCRRPGGEPSPEGTTGQSYNQYSQRYHQRTNTNVNCPIECFMPLDVQADREDSRE

SEQ ID NO: 45 - protein, 2296 aa, Homo sapiens [sequence omitted]

SEQ ID NO: 46 - protein, 732 aa, Homo sapiens [sequence omitted]

SEQ ID NO: 47 - protein, 142 aa, Homo sapiens
MGAPTLPPAWQPFLKDHRISTFKNWPFLEGCACTPERMAEAGFIHCPTENEPDLAQCFFCFKELEGWEPDDDPIEEHKKHSSGCAFLSVKKQFEELTLGEFLKLDRERAKNKIAKETNNKKKEFEETAKKVRRAIEQLAAMD

SEQ ID NO: 48 - protein, 165 aa, Homo sapiens
MGAPTLPPAWQPFLKDHRISTFKNWPFLEGCACTPERMAEAGFIHCPTENEPDLAQCFFCFKELEGWEPDDDPIGPGTVAYACNTSTLGGRGGRITREEHKKHSSGCAFLSVKKQFEELTLGEFLKLDRERAKNKIAKETNNKKKEFEETAKKVRRAIEQLAAMD

SEQ ID NO: 49 - protein, 137 aa, Homo sapiens
MGAPTLPPAWQPFLKDHRISTFKNWPFLEGCACTPERMAEAGFIHCPTENEPDLAQCFFCFKELEGWEPDDDPMQRKPTIRRKNLRKLRRKCAVPSSSWLPWIEASGRSCLVPEWLHHFQGLFPGATSLPVGPLAMS

SEQ ID NO: 50 - protein, 142 aa, Homo sapiens; identical to SEQ ID NO: 47

SEQ ID NO: 51 - protein, 165 aa, Homo sapiens; identical to SEQ ID NO: 48

SEQ ID NO: 52 - protein, 137 aa, Homo sapiens; identical to SEQ ID NO: 49

SEQ ID NO: 53 - protein, 1356 aa, Homo sapiens
MQSKVLLAVALWLCVETRAASVGLPSVSLDLPRLSIQKDILTIKANTTLQITCRGQRDLDWLWPNNQSGSEQRVEVTECSDGLFCKTLTIPKVIGNDTGAYKCFYRETDLASVIYVYVQDYRSPFIASVSDQHGVVYITENKNKTVVIPCLGSISNLNVSLCARYPEKRFVPDGNRISWDSKKGFTIPSYMISYAGMVFCEAKINDESYQSIMYIVVVVGYRIYDVVLSPSHGIELSVGEKLVLNCTARTELNVGIDFNWEYPSSKHQHKKLVNRDLKTQSGSEMKKFLSTLTIDGVTRSDQGLYTCAASSGLMTKKNSTFVRVHEKPFVAFGSGMESLVEATVGERVRIPAKYLGYPPPEIKWYKNGIPLESNHTIKAGHVLTIMEVSERDTGNYTVILTNPISKEKQSHVVSLVVYVPPQIGEKSLISPVDSYQYGTTQTLTCTVYAIPPPHHIHWYWQLEEECANEPSQAVSVTNPYPCEEWRSVEDFQGGNKIEVNKNQFALIEGKNKTVSTLVIQAANVSALYKCEAVNKVGRGERVISFHVTRGPEITLQPDMQPTEQESVSLWCTADRSTFENLTWYKLGPQPLPIHVGELPTPVCKNLDTLWKLNATMFSNSTNDILIMELKNASLQDQGDYVCLAQDRKTKKRHCVVRQLTVLERVAPTITGNLENQTTSIGESIEVSCTASGNPPPQIMWFKDNETLVEDSGIVLKDGNRNLTIRRVRKEDEGLYTCQACSVLGCAKVEAFFIIEGAQEKTNLEIIILVGTAVIAMFFWLLLVIILRTVKRANGGELKTGYLSIVMDPDELPLDEHCERLPYDASKWEFPRDRLKLGKPLGRGAFGQVIEADAFGIDKTATCRTVAVKMLKEGATHSEHRALMSELKILIHIGHHLNVVNLLGACTKPGGPLMVIVEFCKFGNLSTYLRSKRNEFVPYKTKGARFRQGKDYVGAIPVDLKRRLDSITSSQSSASSGFVEEKSLSDVEEEEAPEDLYKDFLTLEHLICYSFQVAKGMEFLASRKCIHRDLAARNILLSEKNVVKICDFGLARDIYKDPDYVRKGDARLPLKWMAPETIFDRVYTIQSDVWSFGVLLWEIFSLGASPYPGVKIDEEFCRRLKEGTRMRAPDYTTPEMYQTMLDCWHGEPSQRPTFSELVEHLGNLLQANAQQDGKDYIVLPISETLSMEEDSGLSLPTSPVSCMEEEEVCDPKFHYDNTAGISQYLQNSKRKSRPVSVKTFEDIPLEEPEVKVIPDDNQTDSGMVLASEELKTLEDRTKLSPSFGGMVPSKSRESVASEGSNQTSGYQSGYHSDDTDTTVYSSEEAELLKLIEIGVQTGSTAQILQPDSGTTLSSPPV

SEQ ID NO: 54 - protein, 1356 aa, Homo sapiens; identical to SEQ ID NO: 53

SEQ ID NO: 55 - protein, 1306 aa, Homo sapiens [sequence omitted]

SEQ ID NO: 56 - protein, 1278 aa, Homo sapiens
MTARGLALGLLLLLLCPAQVFSQSCVWYGECGIAYGDKRYNCEYSGPPKPLPKDGYDLVQELCPGFFFGNVSLCCDVRQLQTLKDNLQLPLQFLSRCPSCFYNLLNLFCELTCSPRQSQFLNVTATEDYVDPVTNQTKTNVKELQYYVGQSFANAMYNACRDVEAPSSNDKALGLLCGKDADACNATNWIEYMFNKDNGQAPFTITPVFSDFPVHGMEPMNNATKGCDESVDEVTAPCSCQDCSIVCGPKPQPPPPPAPWTILGLDAMYVIMWITYMAFLLVFFGAFFAVWCYRKRYFVSEYTPIDSNIAFSVNASDKGEASCCDPVSAAFEGCLRRLFTRWGSFCVRNPGCVIFFSLVFITACSSGLVFVRVTTNPVDLWSAPSSQARLEKEYFDQHFGPFFRTEQLIIRAPLTDKHIYQPYPSGADVPFGPPLDIQILHQVLDLQIAIENITASYDNETVTLQDICLAPLSPYNTNCTILSVLNYFQNSHSVLDHKKGDDFFVYADYHTHFLYCVRAPASLNDTSLLHDPCLGTFGGPVFPWLVLGGYDDQNYNNATALVITFPVNNYYNDTEKLQRAQAWEKEFINFVKNYKNPNLTISFTAERSIEDELNRESDSDVFTVVISYAIMFLYISLALGHIKSCRRLLVDSKVSLGIAGILIVLSSVACSLGVFSYIGLPLTLIVIEVIPFLVLAVGVDNIFILVQAYQRDERLQGETLDQQLGRVLGEVAPSMFLSSFSETVAFFLGALSVMPAVHTFSLFAGLAVFIDFLLQITCFVSLLGLDIKRQEKNRLDIFCCVRGAEDGTSVQASESCLFRFFKNSYSPLLLKDWMRPIVIAIFVGVLSFSIAVLNKVDIGLDQSLSMPDDSYMVDYFKSISQYLHAGPPVYFVLEEGHDYTSSKGQNMVCGGMGCNNDSLVQQIFNAAQLDNYTRIGFAPSSWIDDYFDWVKPQSSCCRVDNITDQFCNASVVDPACVRCRPLTPEGKQRPQGGDFMRFLPMFLSDNPNPKCGKGGHAAYSSAVNILLGHGTRVGATYFMTYHTVLQTSADFIDALKKARLIASNVTETMGINGSAYRVFPYSVFYVFYEQYLTIIDDTIFNLGVSLGAIFLVTMVLLGCELWSAVIMCATIAMVLVNMFGVMWLWGISLNAVSLVNLVMSCGISVEFCSHITRAFTVSMKGSRVERAEEALAHMGSSVFSGITLTKFGGIVVLAFAKSQIFQIFYFRMYLAMVLLGATHGLIFLPVLLSYIGPSVNKAKSCATEERYKGTERERLLNF

SEQ ID NO: 57 - protein, 205 aa, Homo sapiens
MTPPERLFLPRVCGTTLHLLLLGLLLVLLPGAQGLPGVGLTPSAAQTARQHPKMHLAHSTLKPAAHLIGDPSKQNSLLWRANTDRAFLQDGFSLSNNSLLVPTSGIYFVYSQVVFSGKAYSPKATSSPLYLAHEVQLFSSQYPFHVPLLSSQKMVYPGLQEPWLHSMYHGAAFQLTQGDQLSTHTDGIPHLVLSPSTVFFGAFAL

SEQ ID NO: 58 - protein, 205 aa, Homo sapiens; identical to SEQ ID NO: 57

SEQ ID NO: 59 - DNA, 201 bp, Homo sapiens
ggctaccagttacatttgacaagtctgtgcaatggatcaaaatcagaagagatgattcaacttggtgaccaagaagtttctgagctttgtggcctaccaarggagaaactggctgcagcagagcgagtacttcgttccaacatggacatcctgaagccaatcctgagaacactaaactctacatctcccttcccgagcaag

SEQ ID NO: 60 - DNA, 201 bp, Homo sapiens
gccatcaaacaaatgaagaaacacctaaagctggccaaggacagttctgcagatcgatttctcaacagcttgggaagatttatgacaggactggacaccaraaataatgtcaaggtgtggttcaataacaagggctggcatgcaatcagctctttcctgaatgtcatcaacaatgccattctccgggccaacctgcaaaag

SEQ ID NO: 61 - DNA, 201 bp, Homo sapiens; identical to SEQ ID NO: 59

SEQ ID NO: 62 - DNA, 201 bp, Homo sapiens; identical to SEQ ID NO: 60

SEQ ID NO: 63 - DNA, 201 bp, Homo sapiens; identical to SEQ ID NO: 59

SEQ ID NO: 64 - DNA, 201 bp, Homo sapiens; identical to SEQ ID NO: 60

SEQ ID NO: 65 - DNA, 201 bp, Homo sapiens
ggctaccagttacatttgacaagtctgtgcaatggatcaaaatcagaagagatgattcaacttggtgaccaagaagtttctgagctttgtggcctaccaarggagaaactggctgcagcagagcgagtacttcgttccaacatggacatcctgaagccaatcctggtgagtagacttgctcactggagaaacttcaagcac

SEQ ID NO: 66 - DNA, 201 bp, Homo sapiens
ggctaccagttacatttgacaagtctgtgcaatggatcaaaatcagaagagatgattcaacttggtgaccaagaagtttctgagctttgtggcctaccaarggagaaactggctgcagcagagcgagtacttcgttccaacatggacatcctgaagccaatcctgatggatgtgacatgtgatgacattgcacatgggcag

SEQ ID NO: 67 - DNA, 201 bp, Homo sapiens
aagcagatactctagaacggaaggctcccttgatggaacttagacagcaaggccagatgcacatccctggaaggacatccatgttccgagaagaacagatratccctgtatttcaagacctctgtgcacttatttatgaacctgccctgctcccacagaacacagcaattcctcaggctaagctgccggttcttaaatcca

SEQ ID NO: 68 - DNA, 201 bp, Homo sapiens; identical to SEQ ID NO: 67

SEQ ID NO: 69 - DNA, 201 bp, Homo sapiens
tcacatccccagggaagatgtagactatcacctgtacccacacggtccgggactcaatccaaatgcctctacaggacaagaagctctctctcagacaaccrtctcatgggccccattccaggacacttctgagtacatcatttcatgtcatcctgttggcactgatgaagaacccttacagttcagggttcctggaacttc

SEQ ID NO: 70 - DNA, 201 bp, Homo sapiens
ttttaggcggaccacaccgcccacaacggccacccccataaggcataggccaagaccatacccgccgaatgtaggacaagaagctctctctcagacaaccrtctcatgggccccattccaggacacttctgagtacatcatttcatgtcatcctgttggcactgatgaagaacccttacagttcagggttcctggaacttc

SEQ ID NO: 71 - DNA, 201 bp, Homo sapiens; identical to SEQ ID NO: 70

SEQ ID NO: 72 - DNA, 201 bp, Homo sapiens; identical to SEQ ID NO: 70

SEQ ID NO: 73 - DNA, 201 bp, Homo sapiens
cgaatatacaatttatgtcattgccctgaagaataatcagaagagcgagcccctgattggaaggaaaaagacaggacaagaagctctctctcagacaaccrtctcatgggccccattccaggacacttctgagtacatcatttcatgtcatcctgttggcactgatgaagaacccttacagttcagggttcctggaacttc

SEQ ID NO: 74 - DNA, 201 bp, Homo sapiens; identical to SEQ ID NO: 70

SEQ ID NO: 75 - DNA, 201 bp, Homo sapiens; identical to SEQ ID NO: 73

SEQ ID NO: 76 - DNA, 201 bp, Homo sapiens; identical to SEQ ID NO: 70

SEQ ID NO: 77 - DNA, 201 bp, Homo sapiens; identical to SEQ ID NO: 69

SEQ ID NO: 78 - DNA, 201 bp, Homo sapiens
gtcagaaacttccaggaccgcctttggaggcagaagagcagttccacccaataactctaatgcagcggaagatgacctgcccacagtggagcttcagggcktggtgccccggggcgtcaacctgcaagagtttcttaatgtcacgagcgttcacctgttcaaggagagatgggacactaacaaggtggaccaccacactga

SEQ ID NO: 79 - DNA, 201 bp, Homo sapiens
attaacccttggtgaatttttgaaactggacagagaaagagccaagaacaaaattgcaaaggaaaccaacaataagaagaaagaatttgaggaaactgcgragaaagtgcgccgtgccatcgagcagctggctgccatggattgaggcctctggccggagctgcctggtcccagagtggctgcaccacttccagggtttat

SEQ ID NO: 80 - DNA, 201 bp, Homo sapiens; identical to SEQ ID NO: 79

SEQ ID NO: 81 - DNA, 201 bp, Homo sapiens
agtgtttcttctgcttcaaggagctggaaggctgggagccagatgacgaccccatgcaaaggaaaccaacaataagaagaaagaatttgaggaaactgcgragaaagtgcgccgtgccatcgagcagctggctgccatggattgaggcctctggccggagctgcctggtcccagagtggctgcaccacttccagggtttat

SEQ ID NO: 82 - DNA, 201 bp, Homo sapiens; identical to SEQ ID NO: 79

SEQ ID NO: 83 - DNA, 201 bp, Homo sapiens; identical to SEQ ID NO: 79

SEQ ID NO: 84 - DNA, 201 bp, Homo sapiens; identical to SEQ ID NO: 81

SEQ ID NO: 85 - DNA, 201 bp, Homo sapiens
tgccattcctcccccgcatcacatccactggtattggcagttggaggaagagtgcgccaacgagcccagccaagctgtctcagtgacaaacccataccctygtgaagaatggagaagtgtggaggacttccagggaggaaataaaattgaagttaataaaaatcaatttgctctaattgaaggaaaaaacaaaactgtaag

SEQ ID NO: 86 - DNA, 201 bp, Homo sapiens; identical to SEQ ID NO: 85

SEQ ID NO: 87 - DNA, 201 bp, Homo sapiens; identical to SEQ ID NO: 85

SEQ ID NO: 88 - DNA, 201 bp, Homo sapiens
gacgcctgtaatgccaccaactggattgaatacatgttcaataaggacaatggacaggcaccttttaccatcactcctgtgttttcagattttccagtccrtgggatggagcccatgaacaatgccaccaaaggctgtgacgagtctgtggatgaggtcacagcaccatgtagctgccaagactgctctattgtctgtggc

SEQ ID NO: 89 - DNA, 201 bp, Homo sapiens
gttctgctgcctggggcccaggggctccctggtgttggcctcacaccttcagctgcccagactgcccgtcagcaccccaagatgcatcttgcccacagcamcctcaaacctgctgctcacctcattggagaccccagcaagcagaactcactgctctggagagcaaacacggaccgtgccttcctccaggatggtttctcc

SEQ ID NO: 90 - DNA, 201 bp, Homo sapiens; identical to SEQ ID NO: 89

SEQ ID NO: 91 - DNA, 167139 bp, Homo sapiens
tacagttgtccatttgttctatgaagttgccatgtgtattagatcagttcgtctctctttttcattttggtacctgttttaatttttatctccaaatttttagagtttgttgtttataggattgaaaaaatctataagcatcttattttacatcttatttttttagaatgttaatactttatggagcctttttcaaatgctgaactggtgtttgttttttaacttttattttaggttcacggggtacatgtgaagatttgttacttaggtaaacccatgtcatgggggtttgttgtacagattatttaatcactcaggtattaagcccagtacccaattgttatcttttctaatcctctccctcctcccatcttccattctcaagtagaccccagtgtctgttgtttccttctttgtgttcataaattctcatcatttagctcccatttataagtgagaacatgtggtatctggttttcttttcctctgttggtttgctgaggataatagcctctagctacatccatgttcccacaaaagttataatctggttcttttttatggctgcatggtattccatggtgtgtatgtaccacattttctttatccaatctgttgttggtggaaatataggttttcatgaaaagattccaagtttttgctattgtgaatagtgctgcagtgaacattcacgtgcacatgtctttatggtaaaatgatttatatttctctgggtatatatccagtaatgggattgttgggtcgaatggcagttctgcttttagctctttgaggaatcaccatactgctttccataatggttgaactaatttacactcccaccaacagggtgtaagtgttccctttttttcacaacctcaccagcatctgttattttttgactttttagtaacaggcattctgactggtgtgagatggtatctaattgtggtttatatttgcattctctaatgatcagtgatattgagcattttctcataagtttgttggtctcatatatgtcttctttagaaaagtgactattcatgccctttacctactttttaatgggattctttttttctcttataaacttgtttaagttccttatagaggctggatattaggcctttgtcagatgcgtagtttgcaaaaattttctcccattctggaggttgtctgtttactctgttgacagttttttttttgtttttttttttgctgtgcagaagctcttaagtgtaattagataccatttgtcaatttttgtttttatcatgattgtttttggtgtctttgtcattcaaaattgacatagaaaattctcacattgttgcagcattttaaaaaatctgttactaagtataatatacactaagaccctaatttggtttactaattttttttaaaggaaacacaccatatgttgataaaggtttatctaggcagttaagattatactaacttttattttttctttgtatcacctaaattttccacagtaaacaattttttataatctgctttttttaaaaaataaaacatagtaggaagtcattaaactcgggtctagtcttaattgtgccttaagctgtgtttctttgcattctctcttcggccttatgtttccagtttaacttataaatttatcttccaaatttctgatccctctgaaatcttataactaacatatttagttttaccttttgattttgatttaaagaataagacaacatttctgattcactttttcaatatttcttatttgctattgccatatatttcagaaactacttgtggtttatttctgcagttcatgttctttggtggaatgagagtgcagatagtcgtgcagctgggagacataagtcccatgaggatcccagagttgtggcggctggtaagctgtttcactaagcacgaattatttttagaacaaatgtgattcaaccaataactgtatgccttcttatgaaatgtttttccagttcgggaaagtgtcaactacctagtttctcagcagaatatgcttctgattcctgcatcattttcaccattgaaatagttttctactgaaatacaaaacatttcattaactgctctaagatgtgtctgctaatggtgcttaaattctcccaagaggttctcgcttttatttgaaggaggtggtaagttaattagttaatttgctgtgcttcttgcatttttgaaagttacatattctccactgctttaagaaataattcagttcactttcaccttggcatttcagtatctgttacacattagaagtagttgtcactatttcatcatcttggtttttcatttgttttagaatacctcttctgtattttgataactcattgctttatagcattttcttttactcaaataaggattttacatttccttgcctgacagtatttttgaattatttatataaaatatctatcttttcatcatgtctatagttcctgagattttaaaaaaatttgcttagtaaaggttattttgtgatataaaatgggatttataaaaatattagattgtttatttctttactgtggaaaagtagaatgtcatctgtattaattattgcttttacattcattgattattagtcattctaacttggaaaataatgcaattgggtcacagtgttaaaaatctagaaaagacttgttggtttatatgctgaaattgttcatttataattaattttactaatttctacttagtttggatcactaacagagatcttgggacatttatttgttttaaagaaatatttatggttatggaaacgcttgccctaataaaaatcctgcatattcattgtttttttaaattcacattttatacttatatgatctctaaagctcttgctatgttgctataagacagtaatatagtgataatttaccaactttattgaaaatgttgttacatcaataaaatagcatgctgggaacctgagaaggaaggtttctttagtactgccacagatgtcctggagttttccttgaaacatctttcatttccattttacttgatgcctctacctactaaaactagatttggtacttccgatagtgtatatttacagctatattatatttacatttttacagactatcttctgataatctgtatttacagctatgttattttatatttttaaaatcttacagctataaaatagtaaattgtgaattagctgtccaagggcaatttggaaaacaaactgtacagtttcctctcatttatcaggctctaagcgatctgcagtttatctgggctattatgcaatgtgagatattatttatgagaggcaggcagtggcagcttaaacagacatacctcctcagcattcttttccatgcagagttcaaagaggcctaagacatctcacatttatgtgaaatagttgaggcacaagtatgtggttaactacacataaattaccaataaaattaaaagttaactaaaatactacagaagacatttaatattttgcttcagactgttatagtaccttagggttatgaacatcaattacctttgagccttactatatttaaagggaaggggaagctgacatttttatcttttttaatgggtacactctacgttaccttaaaggcttccccggtttaagcaaaaatagaattatgtggtttaaatcatataccttattcttcatacttagctccaagtagattatgacttttcctaaaacttaacatgacagagatttgccttccagggggtctaatttgaagaggaaagtaatttaaatgtataggtttatataatagcattgtatttttctctattttattcattctttcattctcttcgatgactcccagcacctgcgcgtccatcttcattcttagccaatgacctttccttttacttaacagagaaaataacaatcagaagagtcttcataagttcccaccccgtctgcccgctttctacagccaaccccacatgccctgccttctctcctttcactgtggatgaaccgcccgtgccccaagcaaagacaaaccctccacttgaacactcacttgctgaaggatgtggcttaggcagttttcctgtctcctgaagccacagtattccccttcaactggattcttctcctcagcatataaatatacttttttttcctatctttaaaaaaaaaaaagagtaaaatcaccccatttttttcctttacaatatgactcaaaagagtagttcatacttcctgcctccattttcttccctcacattatctcttaaacattctctgatcacgccagccaaattgctcttgtcaactcatttcccagttctcatttcacttgacttgttagcagttgacctctcctttcttctggaaagtttcttcgtttctccgaaacactcactgcacaagccttcatatctcctagtctccatcttgtctctttgacctctgatgtaaggactgagtccttggaccacttctcttttctatttatacttactccctgcgtcatcacccccagtcttgtggcttcaaatgctatctgtgtgtggatagctcctccagtccacacctcttttctgaatcttttttcaaattcacacatgtgaatttgaattccaggctcatcacatccaggtgtgttccccacacctccacctgaatgtctattagaaatctcacacccctcttgtccaaaactgagctcttgatctttaaccagaaactttatctcagctattggcaactccaggtttctgttttgctcaggccacagacttcagagtcattctcacactgccttttctctcatacaccattatgtacctgtcagcaggtcccaaatatctagaatttgattgcttcacatccctatagcaactctcctggttcaagcccatcatcatctggatttttgggaagtggtcttaactggtgtgctgcccttcccctctgctctcaaccctattttcaacatagcagtcagaataatctaaaatataaaccagatcatatcactcctctgctcaacaccccctcccaataccttcatgtcatcctcagagttattgtccaagcctctaactgtggtctacaagtctttacatgatctgtcctgttacattttccactctcgctccagacctgacctaagaggcttttctctgaacttgctaaacatgctcttacctgagggtccattcccactgcctctgcctggaatgctcttccccagacatgcatctgcgtggatcatttccatgcctcctcaggtctttgccctcatgaagccttccctgacaaccctatttaagattgtaatcccctcccacagtggcccctatctgctagagactgaatgtttttgtcccccccaaaattcctatgttgaagccttaatctcaacataggaggtttggcctttgtgagttagttttagatgaggtcatgtgggtaatagaattagtgcatttataagggcgtgaagagccctcactgtgaggaaaccagaatgtaagccttcaccagaacttcttcatgctggcaccctggtcttagacttcccagccactagatctgtgagaaagaaatgtttgttgtttaagccaccctgtctatggtactcttgttacagcaacctgaactaagacactatccctctcccctgctttctttttctgttatcaccataattaatgttttacttatatatgatttgttaatgtatgtctcttcccactagaaaccgaattctatgacagcaagggtttttgttttcattattgtcatattacctgtgcctggcatgtgataagccctaagtacttgttgactgaattaacatatgagatctgtgagtctgaaaaaagaagtacatcattccttcacatgtcattttgagccactgttaacagattacataactgttattggaagtgcctcactactccatttggaaagtattcctggaatacacgatgaatgactcagtagaagttctggctatgggggagtgccatcaataaataaaaataataccattgtctgttggttataagttgctgtcacagactatgaaggtatttgaattgtattttcaggaagagaaacagatatgcaaccaatctgatttggttccacaccctgccacagaagtcccaaaggagaagcaaatgccacttgtagactcaaactctggacttcattctcagcaccatctcttaacctactgagtaaatcctatgaacctgactagggtggcaactgaagttgtagtactttctgtcttcaaaggagggtgaacctggagtatgttggaagaagtgttaggttcattagagacacctctttcataactgctgtcacctagaatgtctattctctaagcaccttcttgaaagaagcacattcccccaggaggaggaaatggtttgttttctttagtgacagttggcccaggatcctaaggtaaaggagtatgggcactagacaaaatgagttttataatagtcgattggaaggaatggaagtttttgaatcacaggcttctgccttgaaagggcaagtccgtggtggtcatgaaccacccagagtgtgtacaaggctcctgccagaagaaatgcctgtaggattaaaagcaaaacagcagaatcaaaaaggaagggcacgatgatgcccaggtgcagcctatattattaacagacaaggaaagaatccaaataaaagttctgtaaaccagctgttgtcctgttttctgtttcccttcaaagcaaaaatatagatttgcatatatttgcagtctccccttccttgcctctcagtcttccctgaaaatctattccagttaggtctgcatccttgtcatgctgaaatgactcttatgaaggtcaccaaggacctctgtcttaacaaattcaatagccattcctgcctttactcatttacattccttactcatcttctcagcaatgttggatataattgacaacttctgccttcctgaaacaataattctctgagcttcaacatatggcattatactcttcagattttactctctctcactggccagtccctctcaatttccctggctagcttctcttctaaatgttataggatctcaggctcaagaatgttccctatcttcattctctctaggtaatctcattcagtcccgaggcttaaatatatacgtaccaataacttgcacacttttttttttagatggagtttcgctcttgttgcccaggctggagtgcaatggtgcgatctcagctcactgaaacctccgcctcccaggtgcaagcgattctcttgtctcagcctcccaagtagcttggattacaggcatgcaccaccatgcccagctaatttttttgtatttattagagatggggtttcaccatgttaggctggtcgcaaacgcctgacctcaagtgatccacccgtctcggcctcccaaagtgctgtgattataggcgtgcaccaccacgcccagccaacttgcacacatttatcttattttccatcattgcccctgagcttcagactgaaatacccactgcatttttaacacaaccatctacctagttcaggtcacaaactagaagtcaccttgctagctctctttccctcagcccttacatgcagtctgtcagcaagtcctgctggatctatctccaaagtggatactgaacattaccatagctccctatctgttgctaccatcttagttcaatccaccattatctattagtcttcctactgtcctttcttcccatagtagccagtgttctttctgaaacagtaggtcacaccactactgtttaaaactctccagtggctccttgttgcactaacaataaaatccaaataccttaaaaaggctggcgagatcctgtgagatgtggtccctgctatctctccagttccaccccctgccactcttgtccttgctaactcagtacaagagacattagtacagatagctcttttaccacctcagcttgccaagctttttcccactggggcttttgcaacacttattctttcttccgggaatatccttcgcacccaccttgaaaggctgctcctgctctttttattcgattctgagcatgtcactcctcagaaaaggccatctctgacttctctccattgttatccaattaccatgtcttattttcttcttagcacccattgctgtcaaaatacattagatgtgtttgtccacacatcatctttcaccactgaaatataaattcattagagcaggaattctattttcttctacattgtaccccctagtacctagagaagtatctggcatacagtaaagttcaataaatatttgttaaattaatgtatattgatgctgatgtgattttacaaggtcaattttaactgatacctaacttcaacaaaaagaaccctctgccacttgactgaacctgtacctttggacgagtttcttatccactgagctgtaatttactcatatgtaaaatggtactttttacctcatagggcaggtgttgagaattaaatgaagtgcatgacaacacagtaaacacttgaaaactgaagctaagtgggttttttttttttttttacttaatgtaaacattaccattacaaagtgccaagttttttgaatctggaaaagttcttttgggcttttctacagatagaagaatgttttagtcaaggctcatgggtagggccaggcaaggtggctcatgcctgtaatcccagcactttgggagcccaaggcagaaggatcaccttaggtcaggagtttgagaccagcctggccaacgtatagtgaaaccccatctctactaaaaatacaaaaattagctggttgtggtggcgcatgcctgtagtaccagctacttgggaagctgaggagaatcgcttgaacccgggaggcggaggttgcagtgagccaagatcatgccgctgcactccagcctggacgacagagcgagattctgtttctcaaaaacaaaaacaaaaagcaaaaacaaaacctcatgggtaacatattttcatctaaattacctgcctttttatttttcaataaagttttttcctctccctcgtcattgttcacgaagaaacagtgttctatgatttcattaaagtcactataacatgaacttcaagataggaggatgaagttgtgatgctgatgctcagggggcatcttggctcacttgaagccaagatttttctgcacacaaagttcagatctgtgccacaggaaaaggactgctcacgacactgtcacagccattcctgaggtcacaaatagagacagcctcttgtacttcctcaaaaggactgtttgacagggattcttcaagtagcaaaataagcagacatctctttctgaaactgattcttaatgagctatgaaaaatacatttacatttatcagcactgctcatatgttgtctgcacagcacttattacaggaaaaaaggaaggaatcaccgatattagtatcatttctgtttccatatctacttcgccttcctgctcaccattgccaccacccccagcaccttcccagtataactgctacattgtgtccttatatttttggttgaataaacaaaaggacactgaaggctgcctttgtagcttcccctataccaagtgaacatttattaaataagctcagctacagagcattttcagaaatctcagtgcagcttcataatcattaagcagaatatttatctaaaaacctctaacacttaataccagttactcagtatcttaaccaacatgaaaatacaaaacaaccttttattttcaagtagtcccctcagttctcttttatgattaagggaacatttgaatcttttctaaagtttttccttttgatccaaatcacttcccctctacttttctaatggctttataacccttcaacagtaggtggtgccacaaatgcacaaaagtaaatttctgtagaccaacagaactgtcacagctttattttgtgactcattatattacaacatagaaatatgcattttaatacttcatataaagttattgacatacaaaattttttttcttttttccttttaatgaaaatgatttaacttagaaatctgttgtgaaacttttgtctagttttgcaattctcagatattccagtgcaaaaatagatcccattacagacagcgtaaagtgcttggaatgagggccaatgatgaacaaagagcacaaaaacagcttcatcttagggtataagaagggataatagcatacctaaatccttatggaaatagaaacattctaagggggatgcaacaattttgaaaagaattagagcaatatttctacagtattacattattactagtagataataacaagggtacaaattaatgtctcaatatcaaagtggttcagtattacatgacacatggctctttggaaaatattttacctgatatatacaaccacaagaagaaaacacagacaaatggctttagtcaatgattactatacagtgaatgaatgatgtgcaacatttaatagtcacaaagcatttgctttcagtacagataatgaaatacagtagtgtgaggtttggttgttttttaacaatgaattgtgctgggcatttatgtatagagggcttattattttcttctgtatttctcatattcacagttgttaataagttttctgaggtgtcccaaagatgcaaaagcagaaatttttgaacacgtattttgagaatttctgaaactcacataggtacattccacagggaatatacagaaattttgcttgattgagtatagagttggtaaaaatttctaccacaattaggtttacacaggaaaatgtaaaaaattactattttaaaaggtaacacagtattaatgaagatgtataactatagattgtttctagcttcagaagaggtcctttcaatctgtattaaaatgttgtgttttcttcaaaatagttcacagtgccttttgattttttaaaatatggccttgaaatcagaggaaccgaagtaaggagttgctcatagatttactataatgaagaattagaatacgattttagtaaaatgaggaaaccataactttgattttgaaaaatattaaatgaggagaaattattctataaattctgtatttttgaagatactgtaaaatgcaacgatgccatatcactagttattggaaatatgccttcattacttatatttaaaatcaatattgactttaacttctaaaacaatcatttttttctttttcagcagtgggttatataatattctgtaaatttaaaaaatatagaaagattaatttgaaatctgaagtcttacacctttagcgttaatattcaaattctggaaaaagtggaagaagttagtaatgatattgaaagatcacttgaacttccccaaacaatagttctctcatatttttcttttctctcaagacagttaacagtaagtattagtgaaacagtatttttacaaatgtttactgactagaaaaataagactgggttagaaaactctgaaaaatgctccatatggaagtatttgttgtttttatatttttcttgactagtgattgaagagatgaaaaatttgagactgtcagatttaatggggtatccaatatctgcaaagccaattatttgaaggtactaaatgccataaacacaagttgtgtttttcagcaagttttcaagctagctgttttccctgttgaagaattcattgtttagacttgtgacccttatactttcttggcttttgcattgttgcaattaaaaaaaaaaaaaaaaaggctgcccagtattgttacagtgggctcctacaaccacaagacaacctatatttgtaaaccagtgagctgaataacatggcacaggaagtgtactgagacttaatatctctctagtcttatacgtacgtacatactctttcagctacagcatacactcaaaaaatatttgattgatgaagtgagattaagagtatcctaaatgatctgaaagaaactcaaatataatgtcatgagatcctgaccatcacattgctttctaggcactagtcatgactgatatgcaaacttacataagaaaataaaaatagtggggcagtggccatactcctctataccacagggttctacaaagaggccattctaaggattcagaagtcactgatagaacttaaaattccaaataacattaaaaagtacaaacatttttgtcaaaatacaactccatcttttcattttctagattaattcaaaaagccagaaataatacacttgtgtcagataaacatcttgagatgcagtgtaccatgttagcagacagtcaggacaaatgggcacaggcttccctaggtttgaacgcacaatctctttaatcccatgccctggcttcagcagcttgcagccccagcagtttggctgttgattctttgcctcttaccaggatctaagtatatttaagagtctcataaggatgaccctgtagacccatggctcgaagcataggacaatataacaatggaaccaagtttcccgtgcctggagacacccacatttttgttgcatgttactgccaccagaacagcttatcagagggaatcaaagcaggatgttagccacgcatggcaccattctgtcaactgatattcaatgttgatagactctgagcagagcagctttcacaaaagtgagcatgacacaccatggtgcttcaaactttctgaaaaacttggcactaataactctggcacactcattgccagcaatggatgtgtcaccgggaaaccagtctcctgggcatggcatggcttagtgaatgaggatgtgcattaccttttgattttgatcaataatcgctggccatgattacttgatgaattattgttgcaaccccaatgagaatacacaggaacaaaaaaaaaaaaaaaagtgtgagttcaaacccatatgtccattgggttccataatagagtttcacataggtataggtaaaaaactaaattcaagtctttcacttgagagccatacaagacataggctacaaaggcactgcccctgtaatggaattttgttttcattgcattgaattgcattgcattgaatagtatcagtacagtatccagtttacttcttcccacatcaacttctggctcttttctccacaacacttcacatggtgcaaaggaaagtctagttcctctttactttcagccaccccgtatgaacaggattcttcatacatagctttctttcactttctcatcctgtagaaaagatgtgagaactgcaacgtccactactgtctggtttttgtgtaatgagaggtcttttaagtggtcatcatcactttggtccttggcaaagttcacaaatacctgttaaaagattaagatggacctttataaataccactcaacttgctcattctttattctagttctatttttccagatgttgaaattaggtcaagtaggagcatacagaattacataaatggattaactagaaaactgtgtgtgaaggagggaagaatacttgaaaaaagcaataacaacttaaaaatagactttttttccccccttgaaatggggtcttgctctgtccccaggctggagtgcagtggcgagaccttggctcactgtaacctccacctcctgggttcaagcaattctcctgcctcagcctcgcaagtagctgggactacaagtgcgcaccaccatgcccagctaatttttgtatttttagtagagacggggtttcaccctgttggccaggattatctggatctcctgacctcatgatctgcctgctcctcagcctcccaaagtgctgggattacaggcatgagccaccacgcccggccaaaaactgactttctatatcgccccccacccctacatcaccaactgctcagtcatccatttactttggcacatacggtcttgattaaagggaagagggaagaaaatatttactgagtacttcttaagtgtcaggacctatttggtacttttttatctaatttaaataggattaggcaccaagtaaaatgcctggcccatggtaggtgctcactaaatggtagtttttatggttattattacagtaaattctcacaataatcctatagagtacataggcatcatctcccttttcaggttcagagaggtttagtaaaaagcatagctaggaatagtagatcaggaattcaagcaccaattcaagatacaaactgctcttggacctatgggcgggagtgtcggggcaggaatccacaccctgagaagtaaatctgttttgacactcaaagcttacttggtcaagtgttgtctgagaaacagagtagtcttctatgtggagtcgctttttgctctgggagaggatgctgaatatcctggccagagaagataatgaagatggaagctggtattgtagcatgttccggtgtttctcttttagaacacttccaggaaatgcaagtccaaagaaatcctggacaggcttcaggtccgggttggaccctgctattcgtacaactattgtataaccatctccaaacctgaaagcaggaaaaaatacccaaatggaggatctccagaaaactatttaaaagaatactgaaccctgggaacccaacttgtgccatgaaaaagggcggcccctggcaggcccagaaataagtttctgagagaaggaaccagttatcatttactaaatacttattttatgtgaagcaccatgccatgtgctgtaaatacatgatctcctttaatcctcacctggacccatgaagtctgacagatgttacagagaaactgaggcccagggagttagtcacttgcccatggctcagagctcataattggtagggccaggatgcaaacccatttgtgtttgactccaaagcttgcgctctcaccagtactggcacatgtaaatttttttcatttcatctatagcacaaagctaggaggtagatcttccagggaaactaactcttacagtagttaagtcacttgcccaagagtcacagaaccagtaaatggtaaagacagaatttgaatgcagttcggacttcaaagccctcattctttccactatactgttttgctcagttttatttccctttatgttagaggcaccatttatatactcacaaaagaataaatatcaagccttctcactaggcactatcccaaagaaattatctttattacctattttttagatgctggacactgccaaggcacctgaaccttccattgaccatgattgccatcctagtgcaaagagcttcacattcttccatactgcggtaaaacagaaagaggttttagttttagagagattctctgtaaccatgagaacatcaccatgacttccagcattccagcttcctagggaattgtattctgttacaagtacatgtggatatagggatgatgctgttcagtgtagtggtgtttacaattgtgaacaagttggaaataatccaaatgtctacaaaagggggaatagttaaataagagtatatcctaatggaatactatccagctataagaaatgacacctaaatgcactgacttggaataatgtttacaatatattaagtgaaaaagagcagtatttatactgggcttgcatttttgtaagaatatgcatatataatttcaggtaataattgttttactctttgcttttctgtattttctaatttttacaaaatgatcgcatattctacttggaaagttaaaacatcccacagtgaggaacccaagactttactacggacctatgagatgtaagcactactgatctcccctccttgacaacacttagggcacaattccacaagaaccgccgggctttgggatccatgcctgtggtgggttcatcctgtaattagaataaaataagtcttatttgctggggggaaaaaaaatcaaagataaatttgtttttaaatgcagaagcatctttgaaacagcttaaattttaacttgccattctagttatttcttgatgaatcaaagaattagagtaactttcaaattcatttgtaaacaaggtcattattataaatgtcttattgatgcaggaaactcaaatattctgagtacttttttatgtaattaaatttctccaaataaatagggaaggaaaaaggccatttagttgtaattatcttttcatgactgataagtatatacaaaacaactttttgtctgaaacctctattgaagtcagtataagattggggtgaaattcctttttttttttaattccagctcactcagattaccctagtatattgcaactgttagccttacagaaacaaattccagaccgaggtggaatacataaaagcctcaaaggcttcttcccgtaataacatcaatgctcttatctacagaagaaaaaaggtcaagggccacttcccagtctgatctgtttttcatctatccgtgtgtaaggaactatgacctagttgctaccttggggattttaaagctgtgtccacactcttcattttcagggaatgaacacaaagatgattagaaagaatgttccagagaaagatcaaatcacatatccagcctcaatcacgctaagaaacaaagtgcttggagtgcctctatttgggagcatctgcaggcatggtacagccaccccagtgtgtgccaagggagaagcttccctctgcttttccaaggttgctctgctgtccctgggggaagacaagccaatcatacaacagccctggacatataggacttttgaacagtcatgttttccactcaggccagaacaacagttttccatccacagttatactcaccagaaacaccacaggaggcccgccgatcaaagccatggctgtagagagcttgcgtttgttgcctccactatagttaccagcatatttttctccatacttcacgaggcccagtttccgaatcgcccactcaccaacctacagtgataaaaagcaccttgactttggtctggcttgggaattttatcatgctgtcctacacatacatgtatgaaagttctttcactgagtaggactagattctataatcataacctgacaactggtgaggagccaaagcagggagaagggactcgtgtggtgggagcagcactccctctctgcccacccagccctgccccaccaccgttacaggtttccaccctgaaagcagatacaaagaaccagcattttgtgctgctgcattcatgaggaaaaacagcctgaagtcaatgcgtgtggaaaagccataaggtatatattgtcaggatgccaaaggagacaggctggctttcaggtgcccacagtaccttgccaacttctttctctgggactcctctcaaaagggcaaagaactccacgtgttctctcccagtcaacagctctgtgatggcatcaaactgagggcagtagcccatgttctgatgtacttcatggatgtttgataagatactgcaaaggacaagaaaactacttagattttaagcaggtagagatactctggttagacaatctggcctaatgttcctgtaaagtatgcttctccattacaaagataccaatacatctgctgctacttgaaagcacagcctttctgcccccaggatgctagctcttcctggcaggcagggttcctgcctctaccctccccagtccttgcacctccctggctctctgaacacttcagtctgcaggtgcagtcccatttcagaatttctgaggtcatgccaaccactgcacattctttaccaacaatctcagtcacactaccccagggctttaatgctaaggccccatcctagacttcactcatatgcaccattcacatgcaccaaatgagaaggcccagaaattttgagtgtgagcaacacagaacctagagacacaatttatgtggtggtggggtggctttggggttctatgaagccagtcaagtgaagaatcacatgtgagagaagttcagtgttcacgttccagactgatgactgcacctcagccacagcggcattgccatgaacttggccttctggcagcattcattcctctctgtgtatctaattagcacccccagggtcagcctttttcagaattaggattgaggcacacgtggacaccgtgccaggccctcacagctataccaaccaaatcagttcttacaaccagtccctgtgacaaaccttactatgggctggttattactgccactgctatatgcgtcaggagcttggtactaggagcaagcctaggaaagcagttgtgcagcgctaggcctgctattcccagaatgtctgttctcttaggattcctttacattgctactgcaaaaatgtaagagacaggagaggagatcatgaatacattaatttccttgctcttttcaattttattggctatccccctgtccagtgtgttcaaattgtgagtcattgttcattagtggtttgggaaataaatttagtgggtcatgaccagcacttttttaatgacgcagtataaggtagaataagaaatagcagagtgcactacaattagtaacagtaggtactgctttatgaaactttaggttatacatgtgtctacatgtctgtgtgtacatactaggttgagatataaaatgtatttcccacaacggtcatggtcaaaaaactctgaaagccactgccttgtactatctctccacataataagtccagagaagccgggcgcagtggctcatgcctgtaatcccagaactttgggaggctgaggcaggtggatcacctgaggtcaggagctcgagaccagtctggccaacatggtgaaaccccatctctactgaaaatacaaaaaaattaggcaggcattgtggcgggcacctgtaatctcagctactcaggaggctgaggcaggagaatcgcttgaacctgggaggcggaggttgcagtgagccaaggtcgcgccattgctctccagcctgggcagtaagagtgaaactccgtctcaaaaaaaaaaaagcccagagaagccccacatatttaaagtacttagagtaacattatctaagaagcctataaaatgtagctgtattcccaaagatcagattgctttgtgacctgtgcagtctcagaaaatggcctaacggtggctcagtcaatttgtatgctctttagagagggcaatttactttgtaggaattgttcctgaggaaataataaaagatgtatacagggacatatttacatagtgaaaaatggaaactaatgtgtccaacatttataaggaatttattaaataaattataggtacatgtacatagggggattttatgtagcaatgtaaaattccacatcttaggaaatgtaacccactgggaaatattcataatacactcattaacaataaaaactaattttaaattctacatacagtatgatctcaattgtatggcacatttatatgtgtatataagacagatgtggggtgatggaaaagttctaaaactggattgtggtgatggttgcaaaactctcaatttaccaaaaatcactaaattatactcttaaaaaacaagcaaattatattgtatgtaaattatacctgaataaagctgttaaaagaagagaatgagactgaaaggaaatgtaaattgtgattatctctagatattgaaatcatggatgattttatgtgcttctttaccctttactatatttcaacatttttatgaactctaaaaataccactgtaatcaaaaataacaacctatttctttaaataaattaaaaacaaagtctttgcagcaaaatacaagccacttcttttctcacctatttttgttaaggaaagcatctcctctggtaacagtggtatctcctgttaacatcttgaaagttgatgattttccagccccattaactcccaggagcccaaagcactgaaaaggaaagattaagttgtataagcaaactctaaaaacatgaatataaatgcccctaacacgtaactacctcaaaccttcaattcttaaatatcagagaagaatcaaatattttcttggttttaacacatcgtatagatatttaaatatgtatttcataatgggaccattttaagtgtggctgtatttataaatattatttgagttgtcaagttgaggccaaagttaatgtgtgaaaaacagtaatgaaagccagctagccaaattgcaccacctactctggcaaaagggcataaaagaacacaaacggaaaccagaaaggagaaaatctatttttaaaaaactatttgaatgtcatcaccatcccaaatggatcacaaaagcatgttttagatgtgcgtgctttttctgtttttgttgttgacatgagtctcactctgtcaccaggctggagtgcagcagcgcaatctgggcaacctccccctcctaggttcaagcaattctcctgcctcagcctcccgagtagctgggactacaggaatgcactactatgcccagctaatttttgtatttatagtagagatggggtttcaccatgttggccaggatggtctcaatctcctgacctcgtgatccgcccacctcggcctcccaaagtgctgggattacaggagtgaatcactgcgcccagccccatgctttttcttaaattgtattggattctctgaaatcattctcttgacatacagggtccctctcttctcgatgactaattgctccatcctggcataaatacagaagcctttaaaatccacttttacctcttaacgagcatcgttgcttgattgggtagagatagtctgaactaatagggacaaacgcaatatagacaaagtgtctttacctcaccaggaggaatgcccacgcaaatcctgtcaacagcaggcttccgcttccttctatatatctgcaacaaacaaaatgtaaacattcataagcctcagtgactcacagctctcccaagcaactgtggaaggcaggactataaaccacatacactgcaacataagacttgtcaataaccctaagccataggcatatttgatgtgccaagagccttggtctgcgtttgtggcgactggcttctgaatgattctgaagctcaaaataaaagtgaacttactttttaacctgtctttttagaaccgtatcattcattatcatctacataatttttcatctattcaacatatatatgtattgcaggtattttaaaaattaaattccacagagtagaaatttgtaataaaaatattgcaaatactgtacagattccaaaaaagtaaaatttggagatgctggcatctagagggctgatatagaccctcttgaacacaggcaatatatcagctttttggactatgaaactcaaactcaaaatcaaccatttattctctctacctcagttttgactagatatacaatattagtatgttttaataactaacacataaatgtaagcatataaaaccaatgtattcgagaatgggaattcatatcacaaaagaattctcagtaagaattctttaagaagtctccatggtgtttttaaaataaaattgacagaaccttggtatagatgtacattttgggaacacatgcccttttattaagcaagtcagcaaactgctgggttacagcacataaagctgaaaaaaactgaagatgagctattgtaacctgtactctctcaccttcgtcaactccttgatttctaagatgtcattctggcctccaccatcaagaattctctgtctttcccgcctcacatcttcatcttcatcattcagaggagatagctttgcatttacaggtcttgggggaaaaaacaagaaaaatgaacctttcaaactatttttcaggacaaagattcagtctctaacgtagtattataaaacctacttgccacagtctccaggatgggcagggagggggctgcgggatgcccacatcaggaaaatcagttttatcacatattttgagttcagttcaatgcaacccccattggtgagtgtttccctgtgcgcctcctctgtgaccctcaaccaggtgctccacgggttctaagaaaaagctcacctgggcctgatgaagaatctgtactggatcagaacagtaatgaggaagaacaccaccccttccacggccatggcgaagaggtttcgtcccaccaagtcccaagataatggtgacacaaagcgattctcccctagtagacacaatgcagagatccggtcagaatggagggatcaaaaaccatggcccttcctcaaatttgggcctatgttccttaaaattcaccgatcttccaataaacacaaatggctatcacccatgacaaggaaaaaagagtaacaagagagtgatcactttccaagtctgatttgggaaaactttttatgacccagtatcaatcagaatttcagagccaatgtgtattcgatttgtaacttcactgaagatatctagtatttctttttttaatgagacatgccaaaaatccttttaaaaaggcaaacgacccaagtaattttcacagtcagtatttttaataaattctaagttttagtaataataaatatcagaaagcactttaagcagattcccctttcagtagcatatatcctagtgaatcaattaaaccactagattcaattaaatctagttccatgtaaccattccttaaattccttacatatctcctttgtagcccaagttgcaaaaagcccctcttctatgaacagtaaataacatggcccatttgactatattatctaatggatgaataataatcatatggctaccggagaaatatttttaaccattctaaaggtagaaaaagatgtaatacattataattttatagactgtgtaaaagataataaatgacctcatctgcaggcacatgattcgcctaaaagagccaaagtttgcatctttccttctgattccctgatcacctaattctcaaagttatggtttgacttttccagtgcttctaaccaacccagacagtggcatgagccagtggatccaagcaaataacactattttccttaccttcaaaactgccctttcacttttctcaatgctatcagagacacagacaaatggttgtgtcacaaaacccatgccacaaccagctgtgttggcatgagccctgtcactgggcatgggggtgggggaacatcctgtgcttagtcacctgcttctttccaaaacaaagttcagggtaccaaggcctatgcagagtgccatctccattaaagcatcctacagccactgcttcactcaccaaacctttccagggcatcagccattgcctggtttttcaccatgtcgatgagccctcgtcccaggcaaaaatgtgggaagatcaagaacacggacttcaggatatcattgatattattcagcttctaaaaaaaaaaaaaaaaaatgggagggaagggagggtgagggagaagaaacgggtgtcattcatggtttatcctaaaaatgtatcaagttctgaaatatgggagtgaagaaaaaatttgattctctagggacaaaccagaccttttaattcagataccaattaaatagcagcaggcatagctgatgatatgtagcaataaaattctattctttagaaaatctggagaaatgctctgagtatggagaaataatgaataaagcttagaaacaggctagatttaattaaagcaaatccattaaaaatcccttagcatttgaaaagcaaattgctcatgtctgggtcaatatttgagtttcaggattttgtcagaattttagaaattcttctcaaatacatcagaacttatgatcccacaaggcaacagtggccaaatatctaccaactgaataaggggctatacgctggatgcactgtgctagggcatgggagaggcaaaattattaagaaacagactccactccgagtaggaaaagtatgtaaacaggaaattaccatgtaagtggatgtacgttgtactggaggcatggactaaggactctgagagcacagagaaaagagagaacacctcccagcaggtaaggaaagcttcacattttagctaaatcttgaagggcaagggatatactaccagaccctgtgacagaagaagggcatttcaagccaggcctacaggagcatggtggttggaggcaactcatctgaagcttacagctgggaaagggtgtggtgggtatggacaggaagagttgtgcaactgtaaaaggccttgtgtgctgtgtttggacaaaggcaatgacaaccggaatggagaggaagccttattttagaggtccatacctggaagaactgacaacataaccagttgaatgtgggaaatctgcaacagcaaagcaagcatctaggataactctaagagccagcttgggcaaccgagtggatggtagtgccactgagtgtgacagggatggcaagaaaagcattaagttccaaggggaaagaaaactaggacatatccaggttggggtatctatatactatctaaatggagcaatccactaggcaagtgagaatttgagattagagttcaaggttatgatcaaggctaaaggcattgatcttagagatgacaataaaaacaccaagagaggtgatggtaaaagccttaggactgaatggcgtcgcccagctctcatgtgtaaagtggaaggcagaggagctactcttggtaagagcaacattgaaaaaagaaagaagtaaaaaaaactgtcaaaagaaactgaaaggcttgaccagcaaaatgtaaggcacagcaagaaagaaaggtgctttgccttctcagggaagacagactctgaagacaggacaaggcagtcagcagtgtcaataccactgacaagtggaataagatcacaattaaacactgtcctctggctcccagagatgctcatcccagcaggagtgttctctctgcatgactcacattgtcggtgaacagctccagcacaaaggtggccacgctgccattaatgccaatgaagaggttcacgctggtgagcaccacataggctgtgctggggatcttgaacacaaaggaggctgggtacatgagaggtgtgattgaccacctgttgagacacaaaaagataagtgtctactgagagtccctgccctccttctgacactgggcaccaaatgccttatccactgtgcagctccctcactcagaggtgacttacccatacagcaaaagtagaagggctagcacaggcagattggtggaggacacataggacttctgctggaagcagatgaagatgataatgaccagtgtggcagggacaacgtaattgcactaaaagtgaaaacaaagacatccagttcacccctaaatcaaatatacaatgcatcacacaagttttcaccattatcagacaagaaagggcagataaacatattggagagtaactctgaattaatgaagccacataaactattaatcaaaatacccgacaatacattttgacaagcattttccccttggctgattttataaactacatgccctttctgtctttccaacagtcaagccaaggtgtcacactcagtaaacttactgaacgatggattcccagtcagagtaattttaatttcacaggcagcaaataagcctctattcttcttcccgaagatgactgtgtctgtttcatcattaatgctatattatagtctgcccaagttcaatctcacatgtaatctatttatgaggtaactgctcataacatgaatgtcagaattgtttcatcgcactgagaataattttaaagtctgtcctgacagtgtatcaagcagtaaaatgcagaaataaagacttgacgataggacaattatgagaattcacagctggcagagcaaagcaccagcagggaagtgatagtggggcttgtcagccgctagaagaactgcagcttcagactacagggctctgcctcagtccaatcctacttgatgtgtttatcaacaacttagatgaagacatgcttctagcaaatttcaggagctctaaagcagggagggacagataatacccaggaagacaagagatgggttcagggacttgacctttcatctctgaatcacctatgcctggcataagtcagacacacagcactcagtctgtgtttactgaaaggagtaattactgaatcaagataaaacaaaaataaaacccatgtaatttaatatggataaatataaagtttagtttcaaaaaaatcaaatgaatttgtatagaatgaaggagacccgaatttcacaatcatttgtgtgaaatggaggttttggtttaccactaagttgccagtaagacggtgctccttccaaaatgcaaaatctttgtgctgcagtaatagaagtgtgagctaaagatcaactccctctggacccataaccattcagaccacagcctgaacacaaggttaattcttggctttgcttttgaaaacggacattcacaatatacagcatggccatacaaggacaaccggatcagaagagtgacacagtctaaggggcttggtataaacagcaaagatctcatcatcatctccaccatcattgctcacatttgtacagtgcttcggaggttacaaggtgtattctcatatatcatcttatctgggtaatactcaggttaaatgagagtatgagagttatttttaaatatccagggacttgttcggtgggagaagaattagatttgctctgtgtagcttataattaatagaagttacagggagatatatttcagggagatattgtaaagtagagttgaaatataattagaacttcagaattccttcaaatcccccatattggtccaaatagaagcaatatattgtggctggcacaaaaacatatttgcaatggatggataagctgctgataaaatgtacagagttttcaaatgacagatggctttcctagtaaggcaaagaacattctgactctggaggttaaaacccatcagagaagttagaggcattgacttggagttttgacttgtatctctctgattcttgggaaagttgtcacataggaacttaagtggtagtggtattaattttcatcattgtgtacagaattttccctctggtgtgacatgaactctggtacccaatgctgtgtttggtgtcatgaaagtgatcacctgcctctggctatttctttttcatacatctttagagtagctggaacatttcctgatgatagccagagctctttctttcttatccatatcaatccatggccctgacagacatcagaaagatacagcaggcctgtgtccttaccatatcccagacaaaattagagagccagtagatgacaggcttcactccactgatgaactgcaggtgttttgctttgctgacccgctcctggatcaggaatacgacaaagctggctgggacgaaggacattgcaaagatgacacagatggacacaaggacatccactgatgtggtcatcctggagagaaaaagcgtgtgaaaatctgaggggtctttgatgcagttagggctcaatcagtgaggacatggacacacagacaaacacacacgtacacacacacagagatatctgaggcacagcccaaggaaaaacatctgttcaccagacacattttattcagggttaagatgatcatttttaagtctaaaaatatgacaatgtaaatgccaaactggtattactgaggtcaaaagagtccactgtcacaataaaactaatgaaggaagtcagagtggttaatggcattcactttggtccactgttcatgaccttgtaagagcagtaagttgtaaattttcacacacaaaggactagtggggcttgaaaactaaatgagagcagaaatattactctgtaactactcaaataaattaatatttctggctgtaaatcaacttgaaaataacagtatgcagcctattgatctaacacatacaaaaattctgtcagatttttataagaagaatggtctcataagcccattacatggggtcttggtataaagatcctagtgtcctatattagtatcctgtaggagtaaagcagaaacaggaactgccatgctccacatacaggaaaggtatctaatgtgtgtgaaatatcaactctgtgctgagtgctgggcttggcaatttacatgaactgcctcatttaatatcatacatctataaagtttagagaccagattcaaacccagatctgtatgactccaaaggctgcatactttaaactagctcatcctggctttaaacttcacacacacacacacacacacacacacacacacacacacacacagcttaatttaggaattaaagatacaagctaataaaaacatattccaccaaatttaaaacagtggtttttaaacaaatcaaactgattaaacacttataattaaattataatttaattaacaatttttgaactcactttatatgaattcactaaatgttacgatttttacatatcagtgtcattttctcttctgcagttcaagaagcccaaccagccaattcgtaaacttatcacttctgcccagagcctggatcaatccagatttatcataatataacggtctctgcagctgttcccctacaatgagattcacatttttctccccttctccataaccctctcccttgccccactccatctatacagacacagccacacttacagagccacctctgagagctgctgcttggtgagattcaggggatgattgaaagcagtaattccataatggctagggttctctcccttttgcaggttggcccggagaatggcattgttgatgacattcaggaaagagctgattgcatgccagcccttgttattgaaccacacctgaaagaaaacataccaggtacaaggtaatgcccccaaaccgggctcctgcaggcaggtgcatacccaccaaccatgcccataaacctcagaaagaaattctagtcacataccaaggcaaaacactatgatcagagaatatggcgaagtaattacagtgttcaggacatagtgatcactgactatgtgggcaggcgctgtggtgaggaccttatacctttaactcattgaattctcacaacagtttggaaatagctatgattactgtctccatttcacagatgagggaactgaggtttagataggttaagtaacttagtcaaggttacctggtatgtctggtggcaaagcaaattctctgaatcactacactacaccgtactgcctcactggtaaagttaatagtttgctcttttctgttgtgaatgcccctgccaactttaccatgagttgaaagtactccaggaaacataaggattattgttcatcaaaaagctactagaacaaagacagcggtttaccttgacattatttctggtgtccagtcctgtcataaatcttcccaagctgttgagaaatcgatctgcagaactgtcctgtaaacaacagaaacctgcctcagttgtgactgttcacatagataaggggcaacagtcaatctggaacctgtggacaacaggacggccctgtgaagagcaatgccactaccttgttcactgaaattaaatgtgaagccattaaataaacggctcctgagaaccaagtgactagaaatctacagcagtgatgctgccatgatgccacaagtctagaaggaatcacagagaaatcctgggatgcaaagccccaagattttaatgtctggttatcacggtggggtgaggactcctcaaagtgctccaccggcatcatctgaagagccagaaccacgctctgcctgcagatgtgccagatacatgggcccatcactcaaaagcagacttgtggactctaggactaccactgctgtccacaatcctagggtctgttttatcagagccccttaattctcacctaaaaatgggaaacctgagacacagagaaatgaagtgagtacttatcaggtcctacagaccagcttgccagcttaaaaaaaaaaaaaaaaagattcatttcctatttagtcagtgattgtttcagcaaagtatgtttgaaacccagtttatttaccaactgaccaaatttgtaaacctggttgttctgagagctttttttgagatggagtcttgctctgtcgcccaggctggagtgcagtggtgcaatctgggctcactgcaacctccgcctcccgggttcaagcaattctctcacctcagcctcccgagtagctgggattacaggcgcacgccaccatgcccggctaatttttctatgtttttagcagagacagggtttcactatgttggccaggctggtctcaaactcctgaccttgtgctttgcccgcctcggcatcccaaaatgctgggataacaggtgtaagccaccgcgcccagcctctgagagcttttaaatctctggatttaatttgttttttgagatggagttttgctcttgttgcccaggctggagtgcaacggtgcgatcttggctcactacaacctcttcctacagggttcaagcaattctcctgcctcagcctcccaagtagctgggattacaggtgtgtgccaccaagcccagctaatttttttgtatttttagtagatacggggttttgtcatgtaggccaggctggtctcgaactcctgacctcaagtgatccacccgcttcggcctcccaaagtgctaggattacaggcatgagccacagctcctggcctctggatttgtttttgacctacacttttaaacgtacaactaagtaattcagttttgtctggctcaaatcgctaaatgccaaagacggctctgtatgccaacatattcagaacaatgagctgccaggtgatccgtttaacctgccaactactcctatatcccagcagctacatgcccatttttctgatacatcttacgatagatattttaccttggccagctttaggtgtttcttcatttgtttgatggcatcattaacttcttgactcggaggaagtgcttgagtattactgacacccagggaaaagccgccatacctaaaagaacagcctgacattaaaacccagacagtggggtgcacagtatcatcagcagcagactcagtgcgagtgtgtacaaggttcactgagtcaaattcctgttcaaaggagggctaaattttgcctcagagaagttacacgtcagcttcctctaataaatgttggcaatctcttaactcccatggtttctgcccagcagggaggacctggcctgattacacacacagttagatagctgagacattgaggaaagaatggtgtttcatctcacagatgctcctccaacccagtggctcgggtgtgaatgtgggtctggaggcaagcagatggggagttgggagagtgggaaccctgcactgtccagagtaggctgcgctggccttatacacaggctccggctcctttctagcatgagggctattataggggcctgcgtctgctctgcccagagatccaggggtcctggcccttggggaaaaggcagagagaaaagacggaaatcagtaacaaggagccttcgggccccctgacgtagccacatcacctatctcattttccatgatggacaaactggcttcaagaactcttctgtccccagtcccacctgttccttcaaaacccagaaggacaaatgggttgaaatacagtgcaaagagatggttttggcgcttcttatttcctctaagacctttttagtcccgtgctaaatgcctagaaattgtccttgagtccttaagaagcctcgggaatctggtttggggggaaagtacaagtaggtattcccctcacaacactacttacttgaaatccctagacacctgcaggagatttctgattctcctcaaggaaatcagtatatcaaatatttcagaggcctctggaggggctgctgggcactgagccatgatgctctaggcagaaactctataaagcaggcctaatctaaatctgtctgtgcccctgtgtgctccacatgttcacagggcttctgtcctcctcacagtgagatggcacccacaagtgtgtgagtgacaaacaatccccaaggctttcttcaatccaagacacctacaacaccatcctccccctgagctaaacgtgccagaaagacagcaacttacctaaactcattcacccagatcttgttctttaagctgcagagacaaagaaacaaaaaatcagttcaaagaaagcactgagcctattcctaatgatgcaaaaggagtaaatatccacctgaggatataaggaacggacagaaataaccctagaatcagctggccttgtagggttgtgctagagaaaagaagcctgtgttcaggcctcttccagccttctctccatcataaataccctattacttatatgagaaccaggccttgggttaaaccaatttacaaaccaccttatagaccaagatgtaaccaaactagaagctttttctttcttttttttttcttttgggagatggtttcgctcttgttgcccaggctggaatgcaatggcatgaactcagctcactgcaacctccgcctcccagattcaagcaattctcctgcctcagcctcccaagtagctgggattacaggcacgcaccaccacgcccagcttattttgtatttttagtagagacagggtttccccatgttggccaggctggtctcaaactcctgacctcaagtgatccacccgccttggcctcctaaagtgctgggattacaggcatgagccaccgtgcctggcctagaagctttttcaattaacaataatatttcaattgtggatgacatatggagaaattatgcttctttcttagaaactcatggtcactatcactccagcatgcccatgccatttaaagtcactgagatactcctaactgaaagaccccaactgaccaagttgatgggaaggaaacgagaacaaacatttgctgagccaagcattcaacactaggctgccatgtcctgggaagctagaaggctctcccaaggctgcagagccaaggcaggctcctaaaccttcccagagctccctccatgagaccacaaattatcatggagtcccccatcagagagtacccaaggcactctatgtacaccatttaatttagtcctcatgacaaacttataagagcaacattaatatcacaatttagataaactaaggctttaaaaggataaccagttacctggtcaagttgctactaagtggcaaaatttgacgttgaatccatttctattttcattctagaccaggctgcctcagccttgaagctgacaactgaatgttcacagtccctctcgtcatcttttctagtttgggataatatcctaaacttccaatagacagaatcaggccataatctggcatttcccccactgtttcagtctgttatttgtaggtctttaattcctctaattagtaataataaggcaggggccaagtttagtaaaaagtcaccttttggctatgatctgcacatacgtcttcaccagataatccgaaatgtttcttcctgtcaggtcctgaaggatatctgcagtgttttgttttctctgtcatcacatgaaaaccaagcatacgggtctttatagacaagaattgaaacagaaaacaaatcaaggacaacagtgaccatgtccacagtgtgaccggaaacctgactacaggtcccagacactgccctcagtcaaccagcactgagacttggttcaccctgccctcggcactggtaattcacttacaccaagccaaggtctttcccaagaatttattctgaacatctaaacaataaacattgaaatgagattctttgtagtcaagagatttttaggaagcaccatcattcactatgcctaataaatcttctgttcactggagttatactgatgactagattagctgttattttattcattttattttttgatatggagttttgctgtgttgctcaggctggagtacagtggcgcaattttggctccctgcgacctccacctcccaggttcaagcaattctcctgcttcagcctcccaagtaactgggattacaggcatgtgccaccatgcctggctaatttttgaatttttagtagagacagggtttcgccacattggccaagctggtttcgaactcctgaccttaggtgatcagtccacctcggcatcccaaaatactgagattacaggtgtgagccaccccgcacctggactagctattattttcaagagtggtaaccaagccttcttttagttcctgtactcatttagaattgcttgtcctcatcctgcaatttggttgctgataaaagcagcagagagctatcataagcactcctcttcctgaaattctcaagaaaaaaaaaatggctcaggactccttcccaaacagagtctctaagaataccagagttgacaagatccacaggagttttctggtccagcctccctaattcagaggtgaagaaacaggcccaggcctgtcaaaggctaccagctcatttgttgcagagccaagattggaagccaggcctgccacagtctgtcctgtgactttactgctgtgggacaggcatgggcacagtgtggtccaaaccttctcccctcaaaactcacatgctttttcttatgacaagaagcgagttaaagactgaaacagggctgggcgtagtggctcacgcctgtaatcccagcactttgggaggccgaggcgggtggatcacctgaggtcaggaattccagaccagcctagccaacacggcgaaaccctatctctactaaaaacacaaaaattagccagacatggtggtgcgtgcctgtaatcccagctactcaggaggctgaggcaggagaatcgcttgaacctgggaggtggaggttgcagtgaggcaagatcatgccacagcactccagcctgggcgacagagcaagactccgcctcagaaaaaaaaacaaaaaacaaaaaagactgaaacagaccctcccaacatgatatctcactcattcctgcttccaagcggaagctaccagcccatcctgcaccccttctgcccaatcaccccctgaaagtgactcacttgtggaggaggcagcccccctgcccctgggggacacacaggcagcatcttcttgattttgtcgctgctacactggcatgcaggtgaagggttctgcattgtccagttcccattctggaagaggtccatgatggtctggggaactggggcagtggtccactcttcctcccctgcctggcagggcgtgtctctgcaaagggaagacagcaagagtaggattaccagagatggcctggcctttctgttgcctcaggagcacaggatcattccgtaacaaccacaaacatgcatctattccctcaccatttggaaaagacaagcatgatctcatttgattgcttgatcccacaacagccttgtacactgtgacatcatttatatcatcattatgtatcattttatacataagtaaaatagaatgcaaagaggccctaaatatttacatactgaactcagttcaatccaatcaaccaaccatttgctcacacaacaaacattcgttgagcatctactacgtgccagatgctgtccagtatattcgagggcctaaggtgaaaatacctgccttcatggaggtgtatgcccatggaggagacgaacaacaaatacactaataagataaccttagatggcccaaaataaagcaaaataaaaagacagtgactggggagaatgaacctactaagagaagacatttcagccaaaacataacaatgatggagaacaagctgggcaaaagcttggcaaaaagaacattctgagcaaaagcgatggcaagtgcaggtacaaaggccctaggaagaaatgcatttctactttttaggaataataggaagacagcatggctggagtaggataagctacgaagaagagtaatgataaaggaggaggagaggagccagatgagagaggcctgggaaagagtctggatcttatgctcgatgtgctgaaaaatgagtagagactggcaagatccaatttatgttctcaaatgagtagagaattgggggatgactggggtgagaatgctcgtcacataaagagctacgctgtctacaaattttccctggagataagacacaaagccttcaacctcatctccagctctgaattactgtgggacatcagcaggtcccctgctcttttgggggcttattttttccactggcaaaataaaagtttaaaatgatttgattcaacaagtcatttccagttcccttccagtttcagaattccacaatttaaagtaaagttacagcaattatttccttattattaaatattaaatataattgccaggcacgatggctcatgcctgtaatcccagaactttgggaggcgaaggcgggtggatcactaagtcaggagttcaagaccatcctgtccaacatggtgaaactccatctctactaaaattagaaaaattagccagtgtggtggcacatgcttgtaatcccagctactcaggaggctgaggtaggagaatcacttgaacctgggaggcagaggtggcagtgagccaagattgagccactgcactccagcctgggcaacagagcgagactccatctcaaaaaaaaataaataaataaaatatatatatatatatacacacacacacacacacacacatatatattatataaatatatatttttaactatttcttattgttttcttatgtattaaaaattcaaatgaagttttccagattgatctctaattgtctccttaaagcacctgaactgaccagaaaagtcacactaagacgcgctgccctcctgaagcttacactctgaacattcaaaaggggattggctgagacaaatttaaatacagctgagacatgctcctgtcaaatttccttcaggtccaccatttttttgcaaaacctaaaaatttgaatttcagtaagaattgtaaggataaaggctcttccttccaaccacctccggcagactgtaggtggggctcagacatcatgtttgaaccctctgatgtcagggccgggcctcttttgtctctatgggctggctctcagcccagttctggctcctacagagccttcctaagctagcatcaatccatgagttcatatggttcagctggccagtgatgaatccagataactatattatcatctcatctcatgcttctatcttccctacacaaccttcatgtggaaaatcaaaggcaccatgaaatccagataggccgtgtctgtgtccttctctatccttgtcatctggttatttgggaaccaatattagctgctaggatttaccacccattatgtactaagtactaacaagtatttagtaactatccaatactaattaagaacaaacaagcacacagtagctatccatttagaaatctgctctagaaccttgtataaacaggttatcatgctcactgttctgtggtgtgcagagtcacctatcttcccattgaaacttgaaagtcaagtttgccccctctccaattctccagcaccttcccaccttgccataatttttcagagatcactgttgtttcatgacctcagctgagattctgcctaaacctggaaacactaacccacctctaccagccttgagcacggcctcataagatcctcacctctccaccatcttcactcacagtgatctggtgacctcccttcccctacactcacttaagagtcatatggatgcttcactgaatttatttatctactgcttactttttaaaagggggttttgaaggaaagtacaataaaaatatacaatttgagaagaagaaagtgtccctttttataaaaattcatatgccatcttttcagattataaaagcgaagaagctgataaacaaaacctaaaaatcatatataatgagagcctattgaagcacttaagtacaggggctgggagagaaagaaaggaaaagcatttcatcagtaagtgtaaagtgctatttaaattaaatattaaggttctaaatcagtaaacaaatgtctgtaatgacgtgctttgcacggtgttagaagactctccaaacgtttgttcctagataatttagttcggttactaccttcgctttttgtaaataaaacataataataattcaaagggcaaatgctggcggtcacaatgtggcatgcagttgataaatgcagcatattagaaatcaaaccaggcaacaagcacaagaagcctgcttatggctaaagtggcactcacgggattgggtttccttccatacagcgggtcccgaagccagggtctttggtgagggcgtttaagagttccagggttcccgtgtcctcaggagcatcattgctgtgggtacatgagaggcagccagcttagtaattcattaaaaccagtaatcgagagataaaaatgtttttataaattaaacattttaggaagcatttctctgtgacaggctcttaaaacagaaatgaacaaaacacagaaaccacccagaaggatctcagactctggccctgtattcggcatcagggtgacgtagagcactccaaagtggagcttgttttaaatgggctgtatgtataaaggtgtgtatgtgtacacacatgtacatacacatatacatttatatattttttttaatttgaagaaaatcaactcattaagtatttcaaaagtgctttcacaattatccctttggcacagacaagcaggattttccaagaaagggcaagaaaactttgtactctttgcatgcacaactagaaagcacaaaaataacaggcacaggtcacaaacacatgctatgttccacaactacgggcaatacagggtcagcagccggaaaggaaaaaataaagtaaacctgaactatgtaagaagaaaatgtgggcttagagaaaaagaggccaattcacattacatatatatatatatatatatatatatacttttttttttttaaatgcttcccttttgtatcactgacacagttcccccatctacaggtctacaaatctttcaggactgaagaaagctcctgctaacaagacccagaaaaatcctttgtccttttctttgatttaatgtattgttacagagtgggggatatttttatctaaagaacaaacactacctaacatcccaaatataacagaatagataataattacatgaattatactttgcagaaaacaagtctctggaggttctatgctttgacagtgtgccctgtgactcagttacagaattaaaacacagctccacaaatccaaatattttataacttaatcatggatttttgcaagggtggattatttcacctaaaacacatgtggctgttcctgacaacagtaggatgaagaggagagaggctgaaaggctcaacagaagactggcctattattcagggttagttcgctgctgttctatgcatgcagtattagcttatacagggacctgagccgcagcagtaaaattcattccaccgtgtaattctgaagtccattcccttggccctcgtaaacatctttggtctgctcgaatcttaccccctcctgggatgtagaagacaaacatacctgacaaatgtgtactgttcgttgtacatccagggctgaagttccaggctggggtacttgccaaagggtggcacgatcaggctgaacacaagggcaatgcagacaaacacagctggcaagacaatctttacccaggcagtggagggggcagggggacagcaggaaacggcaagtgttagaaacaaggccaaggggcaaatccctacgagtccagcccacctccccgaccaaccagcacggcaatgaggaatgcagggcctatgactgtgctgcaccaaggcattcttggcagctgggaagcaatggagcctgaaaactaaaccttttctctggcaacacaaggccagaggttatggccacctggcagaggcactaagccaagaagttcacgaagtaaatagtgctcacattcagggtgactcagaacactgggtcctgcccttcctcctcctgaagactgagaaagactacattgggccatgaacccaggaccaggagccagaagtcctgaatcctggttctgtctctagcacaagtgtacccatgtgaagtcacgctccccactggcctcagttttctcattttaatctgaggtctgagaacacatggcccattcaaatcctacactataataaaaccaactctacagcaacggctccaatcatggacaaccatagtcattatctcccatgatagtctcagaaagaataaatatccaattccttcttcaacctcctaagactttctaccatatcttctctgaaaaaaaaatgacttgggtatactttataagttaacccaaaactccttccatttattgctgagaaatgtattccttataaccttaaagattcaaataatgcccccaattctaatgttctgggatttcaatgcagaaaattaacattgagtgaataattctgtataacaactactataatgagaactatctctatgttgtcattatttatggttgtgttatcaatggtcatcatcaacaaacaaaggtaactgaggatcagagagactaagcagcttgcccaaggtcatatagccaataagtagcaaagtcaggattcaacttgagctctgtatgctccaaactcccgctcttaacaatatccacatcatcaaatgaaagactctctgcagaccttttctctatatttcttgattttatagagtgaaaaaatttaacctttctaactaagcaagttagcatgcaaacactgacatgcagacaatagtctaacaagtcttctctgttggccaactatattctgacctatcttttctatcagtttgagttaaacatcaactcagagaaaaatcatgtttctaataaattcacatgtcaagtgcatctgggcataacaactctcatgttatgacagctgaatacacccaaccagtttttctacactttgtcctttttatgttctcctccaaaataaaaataacatatacacacacaaaactaagcacttactaatgtcaggccccattctaagcacctattcatttttattttcgtaacaaccctgtattgcaggtaatattattatccccattttacagatgaggagattgaggcatagagaagtaacttgccagcggatacacaactggcaaggaatagaactgggattgaaatacagataaatctggctccggcatccatatcttgaccaggatgctatcctgccttcactggtcacagagcctgcagcccacccatgaagccagagtctctggcgaaaacagcacgtctcacctgagcaaaaaatcctttccgactccgtctggcaattagcagtctcttccacaaaagggccacaaactgttgctgtgtaagtttccagcctttcacctggtaggaccctttgccatccatcccactgagcaagtctgtctctctggattctgcaagaagccaacactgaaggtcacctattatcttaggtgttttcggcattgccatgctccttcttctggtgtcttcaacaactatcttgaaggcatgtgtctgaagctagaagtttctcagaagtaaagggctttcatgacaaagctatgtccaaggaaaagcttgactcaaaatgtctaacagtagcagtctctgcctttcagtccttgtctgataagtacagaaaagaaaggtgtcttgagacaactgaaaagaggtgttcatgcgtaaccaggtgttacagccagccattcggatgaatcaagtcatcaatttcttatagactactctatgaaacaggccatgtacgtagcttgacatatttgagaatacacaatggcaattagcatctcagcttctcaccctattatattttggtaaaacgtggacacatttcaaatgatctaagtactgatactgtatgaagtcaggcagttatatataatgtaagagccatacactctttgagcaggggtgagagaactggaaagttttctgttcctaaaaattttctagaaatccttgtcctaaactaatgatacctaactgatgtgcttttacatcttaacaatatttgtttgatgtcttagctctcctctccatctcagttaaacacacaaagacacactcatccaaaatatctaattctttttttttcttttttgagatggagttttcactcttgttgcccagtctggagtgcaatggcgcaaccgtggctgactgcaacctctgcctcctgggttcaagcgattctcctgcctcagcctcccaagtagctgggatgacaggcatgtgccaccacactcggctaattttttgtatttagtagagacggggtttcaccttgttggtcagactggtctcaaactcctgacctcaggtgatctacccacctcagcctctcaaagcgctgggattactggcatgagccaccatgcccagcctcaaatatctaagtcttagggtacaattaactctaacagcaaattcccctttctgactctttcaaaatcactcatctactcgaatgaatatttgttcaacaattaaacacctaatgtatacaagaaactaggaccccgcagaaaagataataaatacatgggttcagaggattgaggcaccatctttatgtctttaaaggaagtgatatggataggctctttcaggtttgatcacatgcacgatgctgcaaagaacaagtggcttttaccatttcctcacttctctttggactctgtagggatctatcaccttggctaaaggccatccaaagaaaacaggtgagagcatgagagagaatttcacattcaaacagtaggacactgtttgatcttgccctaacagacctgggtctatgtcagaatcatttggatcagcagcatcatcttcagtgaacgggcgaagacagctctgcttgtccccgaaggcccgcctgtttcgtcttgctggcaaggtaccatctgaaggcacaaggaaagaatcccatactttattttatttacaacaaaacaaaccttccccatctgcaacaaacctacactctacaaatgagaatgcaatagaacaattcaaagggaaaggaacaatactcgtgcactgagaaagccagcagaaggcactatcttaagtgtgccattctccctcaaggcagttacctgaggtctcagcatccaccccactctcttcggccaccttgaggaatatctggaaaatgagagagatgagaacattataagcaccaacattacgagagtagtcaccactgccacgattattatattactgagtggcatgttagccccgtaagacagagaaagtagaagccacatttcttaataacactttctcagagttacctgggagagaagccgtttttgccagagaacatttcctcagtggtgagagctatcaagctagacaatcattttcaaattaaagttatggctgagcgctgtggctcaggcctataatcccagcactttgggaggccgaggcgggcagatcacctgaggtctggagctcgagaccagcctgaccaacatggataaaacccatctctactaaaaatacaaaattagctgggcgtggtagcacatgcttgtaatctcagctacttgggaggctgaggcaggagaatcgcttgaacctgggaggtggaggttgcagtgagccaaaatcgcaccactgcactccagcttgggcaataagagcaaaactccagtctcatcaaaaataaaaaaaaatttaaaaaaagctatgacagacactgcgcagaagaaatttattctgaacctacagggaatgagtcaagtggcttctttcaggactgtggctctaaatctttgagtaggctagtactatgataagttatccaagacagaatgagcaggaggaaatagagcactagaaatatgatggcagcaattcaaacatcagaagagaatctgaatgagcgcaatcatttccaaactctagtctatagaccactgtgtccaaagtatgcaatagaaatacagacttcaaggcctcacctccagaaattctgattcacaggccctgaagccaaaccttagtatgtttatttttaataatatccccaggtgattctgctgcactgtcaagcttggagaccacttggccagacagcttttatatccccttcagccttcaaggtctgtgatgttgtatctctaaggggaggcattacatggataaagagaggatggactttgaagccccaaacccctgattctgaatctcatgtcagcattcctgagtgttcattttttcatctttttttgagaattaaatgaggtcacagtgattaaaaaaaaatcaaaaaacaaaaaacaaatctcagcacctggcacaagtagactatccatccataaacgtttgtcatttcctatgtatgagaatccagttgatacctggctgtgacacagtcacaccagagaattgctcctgattctgattcagtaggtctgagctgggcccaagttgctgaatttctaacaagttcccaagtgatcctgatgccgctgttcctcacactgtacttaagtaaagaggctcattaaagggtaaataagtgcataggagtttaaggttgggatgtaaatgtgttaggtaccactggtttcaacacacaaatctcaggcatgtactgtggtacagaggaaaacacttctttcctgctatctcccactaccatcttaaatggctcactggggccaacattaatcagatgtcgatgacctaaaaactcaatgactaactccatgataatcctgctcccaatgcaggctactggtctggccttaggacatttggccttgctatatattccgacagtcagccacttaacttacttcttccagggtcgtctctgagatgccataactagaaatgcccaggtctgagagccggtcatcaatctcatgaaagagttccacaaaggctccctccttagcagcttcatatggcagcacataggtcagctcatgccctatgtcttccaccagccgggcttcagacacatgcttcctgatgaggttggagatagcagagacatctgcagggaccagaatgcaaagatggctcaatcaactcagaggggcttcggagtgagggctggccatcccccaccctctcatcagaggcctgccgctcatacaccacacctgttccaggtgtttaggtcattccacatgttcatctctggtctgagggttgggggcaaaggaaaggactatgtcttattcacctttgtatcaccaaagccaggcacattataggtactcagtgtagaatgggtggacagctggatgggtggatgggtgaatgggaggatgggaggatggaaggatgggtgggtgggtgggtggatgggtgaatggataactgaggctcaaagtctggtgtctattgcctaagctctgggattcttcaaaagaaaacttgagtaaaggaatcttaaaagattcttcaccctttcctatgcttataaagtaggttccctcatttacctaaataaagggttaatctaacagtccatggaagcagaagccttcctgggaaaagccagccattaggactaggcagagatagcaagggtcaagacttctgttccacatatgctactggtgacactggcctcctacacacgctacccaagaaaaatctggaaggctgttcctcatctcctgggctctcactcttcttatgtactaagctcaaatcccaccctcctggcttggccctcagctcctcatccctggtattcagtgtccactcccctaagggattccccaaaccccaatcatctcagctctctgggacactgccctgctagctcccaaaccgagccccaggcaccccagcaagcattaggccaacccgccaccaagctgctcccacacccgcagccacccagccccagcccagcagcaaaccttgagtcagcgccaccagcctctgcacctctcctcctctgcctccactctgcccagctgggggaagctcaggcaccacctgaataagaaaccccagagtccttaccgatggtcagcgtgtcactctcatggtcgctgcccaggccagcatcagaactgctctgagaaacactgtcctcctgatggcaaagaaggaggtgagaacgggtcagggacggagcaaggcagagccaccagcacctttgccggggagggcttccaagaagctctgttgtgtgagaactaaaggaaaaagctttccctgggacacatgcactggcagccgtggcttcagaggaccctgtctggcatgtgtgtgccgtgtgaacagcctcgcttcctgagggtgaaaggtcaggaagcagagctgccaaaagaactgtggcctgccaatgaatgctgcaatgaggcctttgccaaccatctcaggcaaggcctttacctggctacatgtctagttcaatgcttctcatgctttaatgtgtgttcaaccactcaagaaccttgttaaaatgcacagattctgattcggtaggtctgagctgggcccaggttgctgaatttctaacaagttcccaagtgatcctgatgctgctggtcctcagactgcacttgagttaagaggctcattaaaaggtaaataagtggataggagtttcaggttgggatgtaaatacattaggtaccactggcttcaacacacaaataaatctcaggcatgtactgcggtacagaggaaaacatacctggtaattgggtctggtcccaccactgttatttacctgctgggtgaccttgaatcagctaccaattccctacaagcctcacttccctcatctgggataataaatatagttaccttcttcccagggtctctctgcactttaattgagatgatagaggttaaaaaaaaaaaaaaggttgtaaatggtaacaacgctatataaaattaactattatcattactttctttcatgcccagagtgtctctggcatgaaatcagtgcctaataaatattggctgttttatagtttaaaagttaaggtcaatgagattgaaaagtaatgagcaggaacaccaggtcatttgtagccaaggctcttacctcttgacaagtctcttttctttgacataataatgtcctctaaggaccttctccatcactctctgtgcctcataggaaaaggaaaacgggattcaacagaactagcacaatgggagcagagggccccttagctttccatgccttaagtatgatatgatttcaaaggggcaacagagcagggagatggtggtttcaacatggcaaaaggggtggagatggagaaatcattcacagccagcaagtcctggctgcccagacccaacaccagcccagcaccaagactgcagctcacctttttcaggtatgacacagtgctactactgtttctgcaggaactgagggaggattccacatctttcttgaccaaggtcaggtagtagcctgttcccagctggttcttcagaaacagggaggagcccacacagcacagcttcccatgggagatgatggcaatcctgtcccccaggacgtccgcttcatccatgtggtgtgtagagagaataatggtgcggcctgccaggcacaaacacaaggatgtgggacaggtgaggcctctcagttctgatttgtcacagtgacagggactagagagatattagcaggggtaagcactggaagagacctggaagccacctttcaccctgtatggctatgacccctagaatggcaaagctttgtatatataggtaccacatcctcacagaggtaagaacagtagcattttatttgggaacttgctatatgccaggcattgtgctaggtggtttgtgtgcattctcatttaatttaatcctctatgaggtaagcaccactattattatcggcaaagaaggtgaggcaagttgtgactttcccaatgtctcagggccagccagagttggctccaagcctgcctgtgctcctcatactgtaccacatcagatctctaaccagagagcccaatcgtcttcctgcccctctccgcttccattcatttaagcatccaccctttcaactaaccataaatttagtgcaccatgttggggacaaaaagatgaataaagacacagcatctcctctcaggaatctcagtctcaatgccctttatctcttctgtgataacagaagagtatcccatggcttcacagaagcctagccatgagatacagccacacttctcaaaagccccccgctctctctcagtccatttactcagaataaatacacatcaggcaccttgtcggtatttcagcagcagctcccatattcccctgcgggagtaagggtccacaccagctgtgggttcatccagaatgacaaccttagatcccccgacaaaggccaaggccacagatagctttctctgcattccacctacaaaaaaacagagcaagacaaactccaggaccagccccagacagtgagtgaaggcagaggacctaggggcacagccagggacaagtttctgttaccaaccgcacccagcctgggaccctggggcagtgctgattttcctccgcatgtgtgtagccggaggaggaggggagagggatagggaaggtagctctgggccgcacctgacagctggcttgttttgcttttcagcttgcttgatggcaaaccaacatccagggccatctgctccatctccgccttcacgtgcttctcagagagccctttcaagcgggcatagaaccagatgtgttcttcgacagtcagcctggggacagggaggcaggtcagctctgggccctactggataccccagaatacagtgtcccctggcccagaacagatgagaatgggcatatttttctctccccgtgctttttaaaataactttatcaatttctgaaaaataatcttcaagattcaaggtagaacaacagtgagcaaccacatgagctgctcaggaaatcaaagtgaaaggtgacagatcgcttccaacctgtttccagcaggcctggccaccatgcaccaggcagttacaactttcaatttcagggccccaagatgtggtctttaatgggctgtccccacagcacgtccaccaagaagtcagctcggcactcacctggagcagccttcctgagcctcaggggacctcaggctctgaaagcggggaggaccctgcacatgagccccatgtgttcactttagatgaggagggagcacatgagccccagctgttcactttagataagaagaaacataagggaaaagccttgcccaagattgcagagctcaggtctctctctgctccatcacacgggctccctgggggccttatggctgatgggacaacctgagtgggagcaaatgtcttaagcagcaaatataggtccatcataccagggccctgaagcactaccaggtctgggaagtctgctccaggcctcaataaggagggtggcgggggagaggatgggctaaagggccctccagcatgacaataatgggaagcaatgtttcccaagcccccatccactggctgggctgatgtcacctctacagctcaaccattcacctcccacttctcctaaaatcaaagaacaactaggtctcaaggtgttcacggaggtgagcctgccatattcaaagaaagtaaaatgtggccagacacagtggctcatgcctgtgttcccagcactttgggagaccgaggtgggcggatcacgaggtcaagacattgagaccatcctggccaacatggtgaaaccccgtctctactaaaaacacaaaaattagctgggcatggtggtgtgtgcctagagtcccagctactcgggaggctgaggcaggagaatcgcttgaacctgggaggccaaggttgcagtgagccgagatcgcgccactacagtccagcctggctacagagcgagactccatctcaaaaaaataaaaaagaaaaaaagaaaaaacaaaaacacagcaaagtaaaatgcttaagtcccactcctcccatgatggcatgacacacacacatccagaaaaggcctattcttaacgtgctgctggtactcacatgtcaaacagcacgttatgctggggacagacccccaggttctgccggatggtgctcatctcagagcgaatgtcttttcccaggatgtaggcggtgcccgaggtcggggggaacaacccggtcaggattgacctgaggacaaaaatttagaagtacagaagtcagggttgacctacccttaactctagatgctccattcagtctgcagagagaacagaacaccaaccctcccaccgcccccattcctttctaatgaaccctaccagacccacacaaagcaaagctgtccttttgcttcggtaaataactacaagtgggcctatgggttagaaatgccaattttagtatgagcattttttaaacgaagtttccaatttgcaatgaaagtattctttaaaaaatgtattttgtatgcctaacatcgcatgcatggaaaatggacaaacaagaacatattattcaaagataaaaacaatttttgtgttaggtagtaggatttctgactgccttttaaaaatcttctgaaaagctcataatatattaattctatgttttaaaaaaagattaaaaagaaaacaggaaaagaatgtcaccccccaaagatataccctttggaatggttagaatggttgaggaatcgtgctggaagccactgaggctaacgctggtgctttacagcccctgacccctcctgatactacccactgtaaggtccttgaggtcgcagggaaggcaatcaagccagctgcccagcttgattgcgtctcacaggtgcttctcacatctgcttagagacagagttcctgggaattaccaactccctccaacatatgtaatctatcttttcgtggctgcaggttccaagaccactgcagaattctgtgaactacatgggaaaggtcatctgaggccccagcttgttttaggctgaagaaataacatctagcaaactagcacgtggaaagacactcatgattagataacatgttcacattcggcaactcctcatgtgctccttcccttggcccagggatcagcatggtttcctaaggtataaatttctaactctactgcagaaccctcctgtggctgattctgcgggaaccacaccctcttcttacatggtggtcgtcttccccgctccattgtggcccaggaaggaggtgatctggccctcataaaaattcagtgccaggccatcgacagccaccttcatcccatctcggtagacttttaccaggttctgaatggacacgcccagcttcaagtgggtgggttcctcctccatgcagactgtgacaggagagaagacagaaatgaacccacagaaagcactgaggagtggagtgtaaggacacagcgcactgcgcttgaactttcagaagtgccttctctccatgtccaccctggtttctcaggcaggcaggaggctataaatgtttatttagggcctatttgggtactgatgttggtgatgggaatacgatgataaaggagcattcagagtctattgggaaaaaggacttgatgaacaattaaaatagaggatgctgaaagctgtttaaaaaatacatctaaaaatgccatggaactgtgatacacccctcccagggaacactactcagcagtgaagaggaatgaactgttgacacacacaacttggatagatctaagggaatactgctgagtgaaaaaaaaaaaaagccagtatcaaaaggatacctactgtatggttccatttatgtaacattctagaaataataaaactgtaaaaacgaggaacgcattagtggttgacaggtgtcaggaactgaggaagaagggaggtggctgtggccattaaggggtagcatgaaggagctttgtgacaatgagatatttctgcagcttgactgagctagtaattacatgaattcacacatgataaaattgcatagaactaaatacgcacacacacacacaaatgagcgcacataaagctagtgaaatctgaagaaggtttgtgaattgtacctatgtcaatttcatggttttgatactattctacagttacacatgctgctaccattggggaaactggatgaaaggtttaagggaaccccctcatgtaatttgtattacttcttgtgagtctgtaattgttttaaaataaaaagattttctttcacgtgccatggaagttcagggcagagagtgactgactacctgagaaccaaggagggatgctcaggggaggggatccggaactagatcttggagagaaaggaggagttgagaagataggcaagttagagagaaagttctcctgtgagagcaaacagtacctacaaaggcatggaggtgtggaagaacatgacatattccagcgactgtgagcatttctaggtgactgaaacaggagctaggtgtaaagaggaggtaggagaagatgattaggaacagcaggcaagcgtgctacactaaggggcatcatacttttaccaagggcaatcaggggatgggcacagaagagactggcagaaaagggacctattaaatatttaggaagccactctaagcacaaagaacccagaaggcagagcctttgatgagctgtggacatctctgtctgcagttaagagccaagagaggattagggatctgggtaatgattacattatgaagcataggctgagctctgtggtagccacttggtctcagcccacacaggctgatacacaggtcaccatgtcacaggcaggcagcgaggctatggttccacaatcacgcttgtctttacctctttcttctagcttgttaggagaccatgaaatgtgtgtttgggagggggcaagtaaaagatactcttctagaagccaagacaacaaagaaaatgtccctcagggatcgagaccgtgaactcccaataggtcaacagcattggacataaatggcatgggaggatttggaaagggacactgcatgtgatttctctgcccctggagtggtttcacagtcttttagaaaggcaggagacatcgcttgcccccaacagttagcagaggcagcagcactaggttaaagaaagagcaggaggtcaacagcacttactttctgatattctcttctggttggaaccagggtggctcttctcatcactttcctcgccaaaccagtaggacttggtgcaaggaaaataccagggcctgggaattccgtactggcctgaaagcaaagcacaggtatgagccaagctcagcatcatcccagtattctgagggtttcccagccaggtccatttcctccttgacacatcctttggagaaggaacagatttgaatggatgtggggaaagagggagctaacatttgctgaaacctgctatgtacaacgtacattctgcacctctgtaagtccttccaacaacccacggggcaggtgccatccccattttagagatgaggaaactgagggataaggagcctatccaaggtccctcagccagtaagttaagactcagaatttaaatccagaatctgcatgctgcaaaattgcatattcaatgaaagaagttcaggcaggagtaataaatatttcatgtatacctccttaggggaggatcagaaggtgaaccaaaaagggttaaatcttgctctctcagaatttgatctcatatgaaaactgtccaacgcaggttcctcttggacttggtcaagaagatgtattatattaagaaagaagtactaaagaaaaattcaacatgaatttttattgaatgctaattaaatcacaggcaggccttagagctagtatatttaattattaacaacctgtactcaggaaacagaacctctcctagttgtaccccctctgaggacacagaaatacagaattgggtgagcattgggaggattcgcctgggcttattgacccagtgtaaccgaagtggattcacctccacgtaccaacatttaacagttgtgtgaccaaagctggttacttaacgtctttgagtcacagttctctcatttgaaaattgctggttattatagtaactacttcagagtagccttgtgagaattaaatgaagcaatgtgtataaaacattttgcatgctgcctggcacacagttttcaagaaacaagtgctgtacaagtagtgacaattgtactttcagcatcagctgcctgtccttggactatctgtttactatagatctatagcccaaaccacttcccagggaagcccatgcactgcagagattctagcacaaagaaaggacatcagctagaagtcatattttccaaacagatgcccaaagcagtgtacctggaaagacagcctcaatgtaccaggtcatcaccccatagaggaaggtgtcaaacagcatcatggagaccgaagtggtgagattgaagccatcttcctccacaggactctcaaacaggttgtcccactgcactccaatgccctgctcctcaaaaagggcaaagtactcacagccaaacccaaaagccacaggagacagcaggctctgtgagaaacaggcaaagtcacctatccatttcctggtcagtctcatttttctatctcttctagtgtaaattatacctggagaaatttgaatttgcaaaatggatcaatcataaggtgcagaagtagtatttacctatagagtccctttaggggagtggtgggctaccaagtaacatataaaatgattccatttgtaaccactcattatatacaaacatttcagaaatgcatatacagtgaagcataaaacttttaaaactttatgtttccaaagatgccccaaggctcagcaatcctgttcccccacacacatgcgcatacccacagtcttctgaggctccctgctcagccaaggatggctcaggatcagaggtgcctgtttggggctgctgatgcctatgaagcccagactgaggcaacaggagcatcctatgagtcactcttagctttcctgataagtgacctggggacatctgacaacttgcacttgtaggggctcacacactctccaagatatccccctgctctgtacgagggaaggaagtgtccaagtcaggaatttgtgggatgaggcacctgctcctcagttgtgcttagttcagaaaacattactcaagcaaaacaccatactggacacaaggaagacaagagaggtcatctctgacatcaagagttttcagttctatttgtggccttggctttgtcatgagcttaacatagccaacagagctgggagataaagggcagagatggcatctgttgcctgaagccattcctcaatgccatttatccccagcccagttcaagatgcagtctggctctcggaaaaattccattcaattcaattcaaccaggattcactgagaagactaaaggtaaacaatttaataaaacacaatgcttgcccttacccttaaagagcttagaatctagagctaaggttcatgtcccattggaaaagacaatcatcttctgttctcaacttgctgcttttattcagggactccaaaggaaggtcaaatgcctacagccactgaagaaaggccagaggtactcacagcgaagatcttgagtgtgaagcccacgtagtcctgccatgccacacacaggacgtagggcaggtacagcgtgaagtagatgatgcccccacaggctgctgccaggttggctctggagaagagtgtgctaatcaggaagcactgcaggattgtcaccacagcaaacacggacaggaagacaaacaccacgctgggatcactgtagggcagcaggtttcctaactgggaaggaagagacacatcaaatgtgctgcctcaacaatcccaagcactcacttgtatgatctacagaaaaaagacagggtttattcctactcatgttagagacaatgcagaggcgtaatgctgttcatctttctgatgaggcaactgatcattaccatcctaaagaagataagtgacttacccaaaactacgcagaaaaataatggcagagttatgaatacaacagagtccagggctttctacgcatttcagtgggcgagtttgctctttgtttcttcaataggtaatttcaactggtttctccttatataaggactatgactggtggcaccacagaagagctgtgggagataatatcccacgtaacttttctgtctaaaagccaaggaaaatggccaggcaacttgactttccctcttgatcaccatggattctgcattcccacaatcatccaaactcttgtggatattttgagcctatctccggctgatgggtacatgtctgcaggacccaccagcatgcagttgtctcagagcagctcttatgcaccaaccatgggaccactacctctgccactgaccttccccttgcagttagataacagagcatgagggaggggttgcttttagcaagaactgtatcctactgtggaacctcaataaagtccttgaccttcctgagcctcatttccttgtctgttaaaagggttagtgaggatagaagaagaagcccatgtgatgtgtttaaacagtccttggcaatcagtaggaactatttgtaacagatggtaactagtattaaattagttagttcttatctctttgtactccttttgcttcaaaaacatttatttttacctgatgtgtctttatatgaaatgcttgcagagaaagaaaattcggatataaatatattaatgtatggttcagacacaaaactgcactgcccagagtccccattcagggaagccttgttgcccagctgtcagtagacggcctcaggcatcagcaactctgggtttgtcacagcagcagagagccatgtaggccctggggcacgaccttcccagggcagcccacatccagtgattgattgagagggctgaggtaggtggtgtcaggagggaggccttgggggagcacaaagggctggatgtttcagctcgatgaagaacaactccaacaagctgcatattctctagagtgccccacggggttggccctatatcacagttcaactcctccctctgcccaatcctgcatcttccatatctcttccataggtattgagccctcataaatacccatacatcaaactctatttcagcctctgcttccagacagtctaacctgcaacaatatatatccttctgattattgttcttagaaacttaggaagaatcgccacccaatatatctaagaaaataaatagctttcagatgctgccatgaaccactaccaatgagacagcatggcacagttgagcatgtggttatctggaaagcatgaaccctgcactctcatcctacttagctgctacccggctgggttgaccttgggcaagtcactgcccctctctgggcctcactttccccaactataaatggatgaaattgcaggaaatgacaggtatgaccccttctctaccagaggcttggattttttttcttcttctcctcccttagcccgtgttgagctatttcggagtttcctggcagggaagagcgagtgaggctgccttaccttcaggatgaccactagcaggccagcgctcacaagaagaggaatgaggctactaatgaaccagctaaaccagaggatgctgttgtccaggcccatgatccgcatggtctctttcagccgtgcctccttctcatacacgatgcccttgatgatcacagccactgagtaaatccaggccagcgtcatgaagaggggcattgaccggctcatcacccgcagaaagctggaggccccaaggaaggacaaggggagaaagaaagacacacgtgagccagggtgatgggccaaggcctctgagcctgcatgctagagggagcaccacatctgggccacagaaggacaggccctctagactctgaaatgtacgtatgatccaatgcttcacgagcaatgcaatgtagagagaaaaacgaggctaacaaagtgttgccaaaccaaatttctttgggggcttgcttcagtaactaggtaactgtgagcgatacttaaactaaaggtagattatgttaaagtactaaaaaccaaaacaaaaaaacaactcattctctcacaaaagttcaacatctccaaggtcatctcactattgacttgcttatcgtaactctaatcacaccacagacatacatttcaggcagctcttgtcaatgtttcagattccaagctagaatagaaaatgcagatgtgcaaagtaaaaaggcacacagattttggaccctgaacttgaggttcacgtcaaagctttaccatgtaggcacatactcactacatgacaacaggcaccagctcttaatgcctctgaactcctgtgccctgtcttaagacatcctttctagagtaaaccttagcttaggggtctttgtaaaagtcttcctttgaaaaattccagctaattgtttagaaggtgaaaaacaggataatttctggtgaccttgaaaagctatagatagccatacaaggaaacacactattcaatgcaaaacagagaaccaatacaagcagaacccagctcctcccgcatcctgatccctacacacacacacacacacacacacacacacacacatcccaccaccaccaccaaccacagagaataagagaatttccagaatctggaagaaacattacatatttcagatgtctgcaataactacacctccgcccattgtcttagaagaaatcattacatccaaaggcatagttcccacaatgagaacttggcagcttagtgactcagcactgaaagattttctaaaaagtctaagaggaagaagctttgttcagttttatttgggttgttttgaaatgtggtttaccacctagggagaagaagtgcacacatttacataaactgtgcttttataagtttagacgctgtttctgcatctatgtgtgagtatgtgcttgcatgtgtttgtcatgacacattttaagcttgcagattgagcaaattttgaccaaaagggtagagtgtaaaaaattaaagtggtgggctgggtgcagtggctcacacctgtaatcccagcactttgggaggccaaggagggtggattgcctgagctcaggagttgaagtctagcctgggtaacatggtgaaacctcgtctctactaaaatacaaaaagtcagccgggcgtggcagcatgagcctgtagtcccagctactgtggaggctgaggcaggagaatagcttgaacccgggaggcaaaggttgcagtgagccgagatcgagccactgcactccagcctgggcgtcagagcgagactccatctcaaaaaaaaaaataaaaataaaaagataaaagtggcaaccatggatgagaaggaaagaggtttactagtgtgtgcacatatatctatgtctgtcatgtggctgcaactgttgacaacttacatctggcatcttatttccagatcattcacacatgcatgcacatgcacacacatatatacacccccatctggcacagtataaactggttaaaaacagtggcttgcaggtaacttacatgtcatcaacgtaacagggatagggcatctgttgcatatagacaccagttttcttctcggtgcccgtcagcaccctgatgattgcctgctccaccacatcctgcaagtaggcgaagcccccccagacgtaccgcatgtcctcaaaggggtcagctcgaggaccagggtcccagtacctaaaaccaaaccacaggtaatcaaccattcctttagaaccatacaataaaaaaaaaaaaaaaaaaaaattgcccaaaaccctactacccttaccaagcccctttttctatttttgtatctttttttttttttgagatggagtttcactcttattgcccaggcgggagtgcaatgatgcgatcttagctcactgcaacctctgcctcctgggttcaagcaattctcctgcctcagcctcccgagtagctgggattacaggtgcctgccaccaaaattcctggaattaattcccttgagtagaaatgctaaatcaaaagatactgttattttatgacctatgaaaaaccttccagcaagtcatgtaccaatttcaccaaaatcatgacaccaagttgagtttttttgttgttgttgaaatttctaccaaatttttagttaaaataaagtacctcttgtcctaatataataggtgctctggacctccccaagaccaggctggtgtgatgggattccacttacccatccttgattttatttgtcctctccacattgtcaatgtccattcggatcttgtacttgacatgatggggcagctcaatgctgcctggagtaattccagtgaacacaataccagcccagaacttcctctcatccagcagctccatggacttgttgatgagccagacttctgttgctatgggttctagcttgttcaggttgacacactgatagaagaacagccttcatgagaacgttggcagccaggacaacaagcagtggctgagacaaatcctacactaggaggcaagggctgactacacgattgctcatcctctctctctaatcctctctaacgtagttttccaaccttcaaccaagaatgaaggattttggtttttcactgcaatttaagagaaattctaagagtaatttagggatatgttatttattgattttgtggaggaaaagaggttaaaacaatgatcttatcttacttttctgttttcttagcaattctgagtcatagcaactaaccaaccaaccagaccaaaacacctcttacccatccctactaatataatttttaatataaaatttcaaaaatttaattggacccgaattcgattttagataagtttcacaaataatgcctttttaagggaatgctttgctaccattagtcactgagataggaaaacctagaagaaaatgggtagaaatattctcttgagcctatatagaataagctagagttaatttactaaagctagagtttatttactcattcaaccactcaactaacatttattaagtgccttttgttatcaaatcctgtgttaggcttgagggatagttttgtaaatgagactatacattatttctaaacttgcctcctgcctgaaccttattgtaacgtctcagagaaagaagccgttaagtcttttctaaatgatcccagcaacagattcacctccatgaagcgagatatggtccggattgcctggttagtctcgttgaaagcttctctccaggtgtacacagaaccattactggactggacatcctctgggtgcttggccaaaaacgccacgatgtcttgggctgtccaatctaagccatccaactgctgttcccaaaagtggtcattgtccctgctgtccaacagcatctgccattccagtgagaaagtacaagtagtaaacaccaactaaatcttgaggagcactacaaaatttacaaaatacttgcatatacactgtcgttgttttatcctcacagaaaactgaggtaaatgacagtgtccctattttatatgtgagaagactgaggctgaagaaaaaaaaacatgattttaaccagggcttggtcatagtattactagatgtggagctgagactcaaagtcagaccagtctgaattcagagtccatgtgctttccactatacgaaacatctcacttaatggtattaactacagtaacaacaacaatacttcctttatatagttactatgttgaatagtgtatatgcttcaccttacacaactccataaagagggcacttttatttttttgccttttgttgttgttgtcgtttggattcagtgtctcgctctgccgcccgggctggagtgcagtgatggaatcacagctcaccgcagccttgacctcccaagcccaagtgatcctcccatctcagcctaccaagtagctaagactacaggtgcacaccaccacacctggctaatttttaattttttcatagagacagagtcttgccatgttgcctgggctggtcttgaacacctgggctcaagtgatcctcccacctcaacctccccaagtgctgggattacaggcacaagccaccagcccagtgagtatcctttaatatttcccattttatacatgagaaaatggaagttcagagaggttaagtctctaagattgggtcacacagctattaagtagcaaagccagaatgaaagcataggccctctgtttctagtgcacctccccctccccactgtgttctatcaccttcctcttttgagacccagtctgttgatcccacataaaacctaattccttcttactgcttagtttagaaaaataatgctgctggttaaaccaactaaagtacaatcttttccaattgcaggatgtacaggtcatgatgcaaaggaggcctatttccatttcttgttcccttgccagttggttcctcacatgggtcaacacgaaagagaaggacagatcaatccgctgctcaatcagcagatccagaggggccgaggcagaggcctgcacagatgtgctgccggaaaaacagcagctgcaaactcagcaaaaaggagaggcatttgcaactcctgtcacagcttcgacagagaagatgaagctctggttctaccgaattggagtctccaagggtctgaaaactgctgctttataaaaaaatcagtcttagtttcactaacattataagcttttccccccttgcgcctttgtatttattatttcaatggcagcataatgattgtatagagtatatgtaatttcattaattattcctatagtgctgaacatttagtctatttccaatttctcacaataacaatatagcaataacattttctctcatatggtgacttctttaaaattatttcagtaggctacatccctgggggtgggtggaatggaggtacgcaggatagcatattttaaaatggttctttaaattttcattccaaattgctttccaatagagaatagcaatttataccatcaccaggaaggtatgtatgtatttttgttaacataacagacacaaaattgtacctcacaagttcacagaggctagggttagcaattctgaagccactttatttggaacaaacaaaagcagagtgaagagacgcagcctttagggtgaagtcggccctgcccagtatggtttctgaacaacatggccaaaaagaatagcaagactagaaagatgcgcccactgagatcactgagcacgtggcctctctggggtgctcgtgaggggcaggagacctaagactgcccgcaggggtggaggcagagagaaaacaggtcccgaggatgggtggctaaaagcagctcagaaaagagagcaaatcagtgtcagagggttccaagacttgcccgagagaggtgccctgggacctgtggggtgaggcaacatgggtagacagtgccagagaaagcagaaagatcagagctaccccagcagaagcagaagcctcagccatcacctcgtgtaggagatgccaggctacagggggtgacaagctcatgtttgtggaattaaataaacactctttaagagagggaagaaaggccgggcgcggtggctcatgcctgtaatcccaacactttgggaggctgaggcaggtggatcacttgaggtcaggagttcattccagcccgaccaacatggtgaaatcccatctccactgaaaatacaaaaattagccgggcacagtgatatgtgcctgtaatcccagctactctggaggctgagacaggagaattgcttgaacccaggaggcggaggctgtggtgagccaagatcatgccactgcatttcagcctgggtgacagagcaagactctgtccaaaaaaaaaaaaaaagagaaagagagggaagaagcaaagaaaacagttggaagaggttcccttttcttccacccacaggctgatgactccctcatcatctgtctccagcccaaccaccctcctccactgcagacctcagtagccactggcctactggacatcgctaccacccacccagctagaaatcgagactcactttgatgcctccctctctttcactgctctgccactaagcagtcaccaggcctcatttcttgctttatgccttggccacttggagagcctcctccctggtctctgccttcattcttgcctcatccttcttcaattcatccaccccatcagagtaacgtatctacatctccccttgcctggtcccctagagcttaaagtaaaggtcctcagcttgacacacaagtccctccaaggcatgcccatgcctttctctccagccccagatccctcatttccaagcatacacactggattttcccagctagattcctaatgaatgccattgccatgtttacaaggatcttgtcctttaagaactgggagcttatgaagaattgaagcacctaaggcaaagtcaatttcagactagggaaccatctacttgcccacaaatcaaaattcactgagtcacttcacagggcctcctataatcctctgagagccagacaaacagaaaaagtccaactagtagaaatatggattccaaggagaggaccaggaagaacaggtctgaaaccacacttaggtctacggggctagatcatataaccctcctttagagaagagaccccactttaatggcatgagctatattagtcagtgtgaatccatacaaatcactgtttatgcttttctcagtataaactcctttgtttttaaagggacttcctcagtaacctgcctcccagcggatcagggaatagtcctaaacttcggaagtgttccccctaggtaggtacagtctctaaaacccagccgcccttaaagtcaataaggttcaaaacaagaaacctggcaaaatcctcacctgcttcttaaggggagcagagacaaaaggaagaggcctccctcaccatggaaacaggaaatagtctaatgattctctaactcagcccaaggcaggaagatgtgattaacagcactcaggctcaggcaaaggagacattctgttcttgctcagcctgctccacatttgaatccaattgtctctagagcacttatccctttcaagtggctctgaagcactaagtgcatttcccctccacacagtaacagcagctcatcattcacacagtgccctgagaatgagtatctcaggccagtctacatgtaacatcatgcttttgctcccacacttctttccaaaacctaccaagacacagggagatgctgtggctggctgagaggctgcagccaaaaaggaaaatagggtactgcaattactcaactccacttccaaacaccagccctcactaagttttgcagaaaactgctatttgaccgtgagtggcatggatgctgatatgcacagcgttatctctgcaccatggcctgtacttctggagaggtggtgccctgtgactttagctatgctcactacattcccccagctagataaactgaaagaattctcacctcactcacacctgggaaagtgaccagaaactcacctctccagtatcaagcaggcacatggtaataatgggagggacactcacccggacaaggtccatttcttggctgttctccatgaaggtccagatcttggggctgagttcctcccacatgccttccagatcatggaacacagccagttcctggaaggtcttgttcacctggagtcaggtggggagccagggaccgcagaaaaaggaggagaagcacagacaatgagcgctttggctcctccctgaaaagataccccatcacagcagccctgtgccagtcctccccatccccaagaaatgcctgcttgtaactatgattctatacccacgactggggagctggcccagctctggtctgcatcagacttgaggttttcactctgggaattccagaagagccgtgagtatacttagcgcacacctctgaagctaccttgagttttttgcccccagttctggggagattctggggagggagtcttgggctgggggcagcttacctcagccatgacctgccttgtggctggagtgtcaggtgtatacaggatcttcccaacgagcagcggcttcagagctttccagataatgcgggaaagaggactagactccaaattcttcatcaaatcattgcagtaaggagctatgaagaagaggagagacaaatgctcatatgcatggtcatatactgatagaaacttacaagggctttggagccagagagttcttagttgaaaccccagctctaccactactagtcatataataagtaacttatctgagcctcagttggctcctctgtaaaagtaaaattcataacatctatgtggagagatgtggagaagattatctcagattaaactgagatatctataaagaatgatgcttgataaataatcagagcttattataacgtcaatgacggataactcacgactgagctgatctggaaaaatgttttcgtgaagcacaagccctcccatccagattcacactctcatgccagcctcaccattgttttcactgacaactaacatgaccaacatttaaactgactcttgaggggcaaccagaaggctgaattcagacctcagttttcaagcaaaaaccaaaatttggggctgggcgcagtggctcatgcctgcaatcccagcactttgggaggccaaggcgggcgaaccacctgaggttgggagttcgagaccagcctgaccaacatggagaaaccctgtctctactaaaaatacaaaattagctgggcgtggtgacgcatgaggctgaggcaggagaatcgcttgaacccaggaggcagaggttgcagtgagccgagattgtgtcactgcactctagcccgggcaacaagagcgaaactccgtctcccaaaaaaaaaaaaaaaaattctcaacagggcgcagtggttcacgcctgtaatcccagcactttgggaggccgagacaggcggatcacgaggtcaggagatcgagaccatcctggctaacacagtgaaaccccgtctctactcaaaatacaaaaaaaaaaaaaaattagctgggcatggtggcgggcacctgcagttccagctactcaggaggctgaggcaggagaatggcgtgaacccgggaggcggagcttgcagtgagccgagatggcgccactgcactccagcctgggcaacggagcgagactccctctcaaaaaaaaaaaaaaaaattctctttaattaacacaaactagtatatgtacacttaacaaaaacccaaatacaaaagttgtaacagacaaatgggtttggttatccagcaggatccctgatttttaaaaattcattctaagtttttcagggatttttagataccaagtatcttctatatgctggaaagataatagaatttttttttttttaatgaggatgccctcacaattaagtctgtcatggaaatgaaggcttccttgggtcaacttgcaagctgggggagaggaggagatgggatttaattaaagttgcctacaataccatccttttaaggcttgtaaagcaacttgcgaatgtctggagtgctttactccagagaagaaaaggttcttgtgttacaataaagtacaaaacctgcctcactcagtgtctgaaagacacacctgtggttggaaatggagaaaggttcccctgcatcaagttttcaaggaaaaggatgccactgcctaaaactgtgacattggatccctgctgccacgaggcatacggcacacgggcccacaaaagtgcttaagtgtggggagtggatatggagacacagggttctttaacactgccttgcagctaagaatgggaaacaaagagcagatcaaatgtctgagtgtgagaacacacacgccaccactaacagttatcttagagagcacagatccaggcagatttgggcttgaatcctggctcttgtggattaactctgatgtggctctaaccaaggcacttaacctctctgagcctatgaaatgtggggttaaagaatcttccctgcagggttatcatgagggtaaaatgagataacttaaacagaatgcacagtgcacaagaaattctacttaaatgttagttttttgttgttgttgttgttgctattatcattactgttatttctttttatgttattataaagcttatctcaatggtaatattaagaccagtacatcatcctttttaaaaatgcttttctagcttttttgagttacaactgacaaaaattgtatatatttaaggtatacaatgtgatgttttaatatatgtatactttgtaaaaggatcaccacaatcaagctgttaataaatccatcacctcatagttgccttttttgtgtagtgtgaacacttcggatctactctcttagcaaatttcaagtatactatacagtgttactaactatagtcatcacgatgtacatcaagatcccaggaacttattcatcatgtgaaactgacactttctaccttacatatattccatatataagtgagatcttgcaggatttgtccttctgccattatctcattcttgatcaccctggaagccacccttccacatcccccagaaaaccagaaggttggctgtcaatcattcattccattgataaacactactgtgcacctgagatgtgccaggctgcattcagagaactggggacaggtagctattcaagagaagcctctctcctctaggaagagctcagtctggtgggcaaatgggcatgtagacatctaacgctgctacagagggaggagatgacacaggccaaggccagaactaagggagggatggggttggggacagggctggggtctgcatggacactcacttgtagagttgtcatagaaggtttcagcatcttcctcagtgccattgcctccaaagagggctttgtagttgttgtcctcataccagttgagagacttgatcttcagcccccctccctcgggatgcccgcagacaatacgagacacagcctggtagatttgggtggaggagctggagctgttcacattggtcagaaacatcacctcctgtcgcatgtcactccagcttctcatgctgaacagctggcgtcagggatggggacagaaaggagggtaggggaagggagaaaagggcagtgcaagggttggggatgagaagagaaagaaacatcttattttcttgacctctcaaaagccatgtcccagaacatattttgtctgatgtcatctcaaagccttgggatgagcttgccagaacctggctacccaatctgtggtccagggacgagcagcatcagcattactggagacattgttggaaatgcggattctgagacccctctgccgacctgcagaattcaaatctacagcttcacaagatgcccaggtgattcctatgctcactaaagtttgagaagcacagcctggagttagtgaagcccctggggctgggcttcgtttcaccgggattatcttccagtttatagataaaagaatgctttctctgaacagctacatctcattgtggttgagcctatcaggaactgctctcatcctcgataactgactcatttctaaaactccccgaactctagtgtagaaattgaacagccctcttccgccttgggagaaaaggtactgtatgtgaagttccctatcttggtctcagtaaagtgtcaggcaatgaaaaagcattaagatgaaaaactcgagtctgggccgggtgcagtggctcacacctgtaatcccagtactttgggaggtcgaggcgggtggatcacctgaggtcaggagttcaagaccagcctggccaacatggtgaaaccccatctctactaaaaaaatacaaaaatgttggccaggcatggtggcaggtgcctgtaatcccagctactggggaggctgaggcaggagaattgcttgaacccgggaggcagaggttgcagtgagccaagcaccactgcaatccagcctgggcgacaaaagcaagactcagtcttaaaaaaaaaagaaaaagaaaaagaaaaagaaaaactcaagtctgaaccctagctatgtccctcgtcagcttacagcctttgaaaagtcacgtcatgtctctgagtactcaacttctccatgcttcacggagctcgctgagacacaacttggcttggttttggtaaccctggggggcagtagatgcttataccatggcctggacactgccctctactcatcatcaagacagcaaagctacaacagtgtgtggtgaggcacaaatcctatgccacacaagagggtgccctgcatagaacagtcccaacagcgtgagtcagaaaccctaggcagtgtctgtgactgccactcaacaggcatcaatgacccaggcagcgttctgtcttacatgcaaatgtattccggcactttgtggagttctcagccccaatgctattatgaaatatttatagagtactttgtatttccaaacatttcacaagaaatcattaataaatccctgtattcctggaaatgtcactgcgtgttcacaccgcctgggaagactgagctatagagcacagaggggaggggaagggccacgaggccctgcacccagcctggaaagctccatatgcctagctttcaacctcacagcctgctggttcctgtgagtggcgtggtccagcactctctaggtcctaagctttgccttctgcctccagaagggaactaggctctccagaggtgggtcagaggccacaaggattttttttctccagagagggggcatctagcacactccacaagaacacaattaggtgaggtggacagcttttcccaactttttcttttcataacctgtacgaggcatacagacagaaaggggacagagaaccaggccattttgccttttgttgcttattggaacagccctagagatttttaaataacagtgagtcaaaacactcacttctctttccacaggcagcctcaccaccaacccaccactccccaatcaaaaaaacaaatttcttcccacataaagccagcaaatctttctaaagaagcaccataaattattgagttattccaaactattgactcttcccagcacccgtttcaggggtaaactcttactctttctcctacacctcagctcacactccaaactttatctgggaagtgcttcctgactctcagggagggatggctcttcatcctttagcccacggatgatggtggtatttgaacatcatcggttgagtgaatgaatgaaactgacttactgctttctcaatccagcacaatgtcctttgtcctccctttcccccatcccagtctcttctcaacccaacaaccagagtgtaaacagtctaaactctagatcacatcatgtcccctccctcaagccctccgctggattctcatctcacccagcaggaatccaaagtcttgccaggcctgtatggcactcacctcctcctgctctgagctcctctcctccccccaccacttgctcactttccctggtccttaaacacattccttaggcatgctctagcatcaatgtctttgtatctgccattcttcctgttcggagtttccttccctcaccacagacatgctatcatctccttcaggtccaactgtcaccttagagagagctttcctaatcaccccctttaaaaaaagcaccttctcatgctctatgccccttaccctgctttttcttcactgcatatatccctcctgtggcattgtacactgacctgtttgtttctgtctctcaccctatacgtgccccaagaaagcagagaagttagcgtgttcactgctgagtcctcaacacctagcaatgccaggcagctggtcggtgctgggtggacatctgagatgctgcctccctgtcctcccttcccatcacccagatgtgaaactcaggtcagctttcattcatcttattcctcaagtcctcatttcctcccaatttccaggttctgctagtgcgtattttctttcttggaaggttctcctttctattccagtcgctactggagtttttcacgaagcaggcaacaacacaggctttggaatccaacagttctgggtttgaatcccagttttgtcaattaactcattgggtgactggaaaagttgcctaacctttctgagccttggtgccatctgcaaaatggacatgatgagacccactcaggtttgtcatgtggagcatacagggaaatgggtgacactgtctgaacctaggcagcttctcagaagacattcactccctttttcttttcctttcaagggttgtgctttggtcaaaattatcaactttccacacgctgactggacaaacaagtgcatttattgatcttctcccatttatctcacagaaatagcaagtcagacaatgagtaacttttgatcaaagggatctggaggtgttctattgaaagaggcagatggtccttgcttgtcctggaccaggagcaagcagggcacaagaaacagctgccaagaaaaacgtatattgttcacttggagagtttccaccacatcagcaatgggaacatcacctgcttccaatttttttttttaatgccagaaaaaaaaaaaaaaccagggccagtgatgtaagtgaaaacagctgtaaccaaaccctgagtttagaggcagcctcccctgttacagaccctgctttgctttctctaaggccagaaatgaacaagggacagagggctgcgaggggatctgcagagcaatgcaaggcatgtcaatgtcagctaacagggccctagagaaatagctacggacttgcaaaacagtttctctttctcattctccccctggaagaaccccagttggtccagcttctctacctagtaaaaaaggttaccagccttcataaccagggtaacaaatggcaagctgaaagaaggcttctcctctggaaaaggaacccaaaagtcagacctcatcagtcagaaacacgtgagcagaattcaaagaaagaaagtagaacaggacaggaagaaatacactaacgtatcaatagtgtttgatctcagcatttttgtattttccaagtcttcagcattttccacaatgaacatgcaatactttcattgttagaaaacataaagttcgtttttgatatttgaaaaaatgatgcaagcaccaaaaaatgggtaggttagatacaagcaccaaaaaaagaaaaacggattagagaagcagctaaaaataagggtggaccaagtctgagacaatttccccacaaattattattttccaatatcctacacgttaaagtctgtattgtttgtgagcactgccccctggctcagcttcctatgctgggggacaccagacagttcctcgcttccaagcctaatttgagacaaggctgggagtcagaaaggtggagtgtgcactggctgggagtcagagctaactgcttttgcaagtgcctacaggccctctgatcctaggacagagattactctgatacatttgtcaacatgtggacctaaaaggcaaactcaacttaatgttcattaagagaccatattcccatagttgaacctcagaagccagatgctttcaagggaaagggctgaattaggggtaccacgttattcctgttagttagcaagcatgtgtgttggtaaaatgattggccttgctactgaagaagcaatatggagaaattgctggtcagacaaaagcagtgcatgggcagtggcagagataattctcctctttacaaatgtatgattacctaggggcaaaaagaaaaaatggagaaggttctaaactagatatccagctgttagccactaaccaattagctctgagacatctatgagttttaggtttcttcatttctaaaataaggaaatcaaaacattattgtttacatcacttatactttgaaaattgatattacatcccatgtgatattcaactcaaaaggacctcttgccagactcaggaatgaaaatactgatacagtggatgatccgcttcctggtactggaaagacacaacttacctcctgggccagagtcccaagactatgcagcaatgtttttgtggcttcagccagctccttgctcgggaagggagatgtagagtttagtgttctctgtaatgagaaagaaaactttgtttctgaattcaaatgtaaacctgaaatctctattggaaataaacaagtgaattaaaactgttcacaatcttgagtttaacaaacaagaaaccgactcctaaccaaaactaaagacactacaattatttctaactgtaagtttgcattttgttcattttcaaactcattctttgattaatggttttaaatgaagtaggaatattgtacttaaaactagttaatatgcaatagattaaaaggatctcatgtgggctggggggatgtgtccaatacaactctgaccgcaaattcccaaatctgtctgcgtctgcaagatgggtaatacgggaatggctttgagaaacaagttaatgacggctcacaagaaaggaagaaaatataaagtttaaagctgtcaaaaatagggaaagatggaattctgtcactctgttcaagtcagcactgtttctaacactggaaattgaatgtagaacacttatttttacatcgagttttagtcaaatctttatatgtaccaattcatatatttaattgctgttatatgtcacctaactgcacagcagatataggacaataattcattagaacagggaaaagataaattagggcagaaagcataagctaaagaaaaaaaagaacaataatttacagactgtgaagtcagaattgctatagctgaggagcctcaagttgggttctgagtgttcaggcttccaaagagaaaaagacgtgagatcagtttcttcactgttatttgtcaagcaggaaaaaagtatccagggaaaatccacctttcttgatgtttctatgagcattgttttattcaatatcatatcagacatctctgaagtttagagaaggttgggctattttgacatttgtcatatcagagactgctgtgaaattataatgtagactacacaagaaaatgtctagaagtggctgggactcactatctctgagaaatagctgcctgggatgttttctttcaaagagaattccaaatgcagaagggattgagtatcattctgatcatcacaatatccaagcataatcctcaatgtgcatttctaagaaaacctgcctaaaggttctatgaaagaacttgtccagctcattcatctcttctggaacgggttcttcaccagagtcccaggactcccacattcacagtcctcaaagggacctacgcggtctcccttaaacgtcagactcagataggcctctgtgatacgcagaggtgttcatgattgttccttccatagagagtaattcatgagcaaaaacaggtgaggtgttttgtttctactttctctctttgggttcactttataactaaaggttaacacactagaagccgaacctagggagaacttgcctggaaaactattacaaacacaaactgagagatcttaattgaaagctataggaggtaaagtgtttttgtgtttaccgttaggcctacaagatgacagatgttcaagacagcatagcaaaaacaaaacaaacccaggacaaaacaagaaacgccagatccacataacctaaatttaagaaaaacttaaaaacgtggtagttaatccacttcttttataaggactcaatggaaataagattgttaggattcttgtcactcactctcccccgccaccctgtgccccaattctccagtcatgggaacctggggtagctatagaaccctgggcaaatgactcaaattccccatccttccattttctcgactatgcagcaaagtttaaaatgctgtgcacatatcacagagtttttataagcactaaaactagaggatatgtacaaagcccctcgcacagtgcctggcacatggtaattcctcacaattgtcaacaatgtcatcccctgcctttttcttcccttgcatgaaagtttactgccaaaactggagggcttttgtctgcaaacagggttttcaacttcttaaaaagacaaacatcctttctctgtttctcggcaaggtcttaaactttttcttctattgaaatgtccttcctctgctaggcagagagctagagctatcatcacacagcatatcagccacactccaatgtgctgtctctaattgtataattactccccaccacaaggtgaagacatcctcatcctgattcctgaaggcttgggataaaatgcctttctccccttctaacccttttcttttactgagcatttgccaaacggcaaaataaaagataatactaagtggatgaaatatacatgatatgcataataggttgtgtatagatatactatatgcatccatgtatgtttttacgtatatgtctatatgtatagacatacatacacacatatatcttacacatattaactggcctcaaagttgacatttcagttgaaaaacctgaaggaaaactcaatccctatggtaggtatgtgtatacttatatgtgcacacacacacacatatacatctttatcttaatgtatattcattatgtaccttctctttaaagcaggtgatgtttttacagcagtggtatagcttcccttgtaattaaatttaattatccaaaagaagtgacttaatttaaaaaatatattaactaaaaatgctaccagctgcacttgaatatgaccaaaatcatggcagaattgtaaatgactgggattcactaacactgtgaggtttggggagctactgtatcagaatcacctgtggtgcttgttaaatatgcagattcaggctgggcatggtggctcacacctgtaatctcaacactttgggaagccaaagtgggtggatcacctgaggtcaggagttcaagacgagcctggccaacacggcgaaaccccctctctactaaaagtacaaaaattagccaggcatggtggcatgtgcttgtaatcccagctactagagaggctgaggcaggaaaattgcttgaacctgggaggcagaggttgcagtgagccaagatggcgccaatacactccagcctgggcatcagagtgagactcggtctcagaaaaaaaaaaaaaaatgcagattctcaaccagctaacacctactgaatgagaagtttaagagtgtgatccaggaatcctcaggagactcttttgagcactgaggtttgagaaccagcaccatgttcacaaagcctcccttcccagtatgctttgcgccaacgtgcttggtggtatattctgtgtctggtccgcatactacaatctgcttcagactctgaagcagtgaagaggccactcggttcacctggccctgagtaggacccaagatggtgccaaacacatggggtgccaggtttgtcacaccaattagatacagtagtcaccaagtgcagatgtttctaaaaaccccaaacccaacattcacccattgtcaccattaccggtcatctgtctcctgaagggtacaaatcagtgaatgggtctgttgtttgtataaaaggtcttctccaacttaatgaatttacatcttcaagggcaatagtttttccaacatctttaggacttttagtttaaatttcttaactctggagcaagcttattctccttctcttaaaagccccacacttcagcaaaactccaggcacacagcagggcctaaagcatgactgtttaacccaggaatgtaattgagcatggatgtaaacataggtccttattaagtttgctgtgggcatcagatttttacattagcagacacaaattcaatgccatatcttatgatatgaccttcttatcagtagtctgtatgttgggtttgactgcttgtttaatttgactgtttttggttttggtctccaacagaaacattggctgaacccacccatgagtaataaggtagaacagtcaatgccattgttagaatcatttttaaactagttctttattcgagattaagtgctcagcatttactaataatattggcaatctgtagtcaatataaacaaatttccattttcaaaggaatattggttggagttacacaatcaggcatggattgacatcacagggttaacaaaacacacatgattcaaattctacatcaagtttaaagcttggattatccagatattttgctcatgacttaattttacttttctgtgcatccaaaacataccataacctgaaaaaataagccaaagactagaagcatggatttttaaaagtttagtataaaaatagaatactatggcaaaaattaaccagattccacatgtatcaacattgataaatctcaagaacataattccaaatgaagtggcaggccaatatgcacacttatacaatgtgaacacatttaggccagtaccaaatattgttatacatagaatgtaagtatacatgatatagaggattaaaacatccaactgcaagacaagagttatctctgaagaatgagctagggaaacagaggtggcatcagctgtacctgtaatgttttatttcttaaatagaacctggagtcagcacggcaaaatgatggatgatggtacaggagtgttctttttgtttgtttgtttgtttgaagacggagtctcactctgtcacccaggctagagtgcagtggtgtgatctcagctcactgcaacctccccctcctgggttcaagcaattctcctgcctcagtctctcacgtagctgggattacaagtgcacgccaccatgcctggctaattcttgtattttcagtagaggcagtgtttcaccatgttggccaagctggtctccaactcctgacctccagtgatctggctgcctcagactcccaaagtgctgggattgcaggcgtgagccaccacacccagccaggagtgttctttatgttattctctgtaccttttttcatgttgaaactatttcataattttctttttaattcaatgaaaagataaaagaggaaggacaggtgagcaggaagaaaggaagggtaaagaatctatgttggcctgagcacatatcagatctaacagacagataacttccttgaataaaattaaccccaggaaagaattcatgccttgaaactagaacacaaaatacggtctgagaatcatgtgtctgcacctgctattaactgtgctctcctgctcatgcttacttgacgaaggcagacaaaacttgccaaatcctatttccaaagagcttcagtaaaaaattcacagcttggaattcctactattatttttctaaccaaaaacattctcttggctatgaactcacataggtctccattgcacccaggagacaagtgactttcttatacgaagtaaaggaaatgggaaaaagaaggaaaataaaacctttagtgagggactatattttctgagttaagataacaggaattcatgtatgactcaatattttcagatcataactgtaatgtcattacaggaagaatgcacaaatgcttactgttattattcaaaagctcccacccacttctgcaaaatgtgttaatcacaacataccatgtttcctaaaagcatggcattctgtgacattggccccagaaagataaaggctgttgtgccccattctttctgggtctaagagatggcttcattatattctttccatcctcatgaacttagttctgctccaaaggccattcacattcacagaaatgctctgtttcgtattcacctcatcaagtcactcagcctgtggagcctttaatggctccctttactctgaggataaggccctatatcctcacatggctcgtgaagaaagacctgcctcagccgacctttgcccacctctgcaggcatcacgtctcatcgttccttctcccatcaaactccccacagctatatctgctccatgctgaactatctcaatcaggtacagttcccctaaatgccaccttctcttccctctcctctctggaccaatgcatatactatgtcctctacctggaacattctactccctgttctttacctggctgacatccattctttaggtccccacttagaggatgtttctttcctgactggaaagactgcagtaggaggccccatcagggactgtatcacacccagcagagcgtctcctgctctatacggcagctgctcctttcctggtctgtcccacccattccccaaccaggaatgaaacagagagggctggaccttgcacatgactacctccctgggccagagcatggcactgattagggctcagtaaatgtttactaaatgaatgaatgcatttgttaatccattatcactacacgaaatgaacactggaagataatattacaatgcattaggagtcacagccaaatagaagtagaaaacacatctgtgcaattaaaatgcaactgaaaatattttcaacttataaaaatctcatctacatctaaatttttcaggaattctatgacaaaatgagacgtgggtatacatatattggaatagtattttcaacacaatacacaattttgttttcctcctgggaatgcatgttacaatgtgttcattgaaacatttcaaatgtcctttaaatatcttcataaagtagacaaaaatctctacttcactttgaccatatgcaaaatccaactcaggctgggattagtatgttttagttcaaactgaaaacaagtaaaccacaaatcaaagactatcaccacccaggagtaattgctatctctttctggtgatttctatgacagtaaagatttcctctgggaaacattttaatattttttattgaaatacgaaattataagactacatttctaaggaatattctaatcttttaaaaaataaatcaacaacctaaatattaactttcaaattagatgtgtttaacgcattcaaacgcttcattttttgctgtttctaaacatagttaaatacatctactaccacataattcagaggaaaaaattaaacctgtatcttagatctggcaacaatatttaatgaagaaatagtataactaaggtgaaaatgtctgtgtaaatggagttgagcagtcatattaacacactgctatatctaccagctagtgctcttcttttcccataagaatgaggtgaacatagagtctgaagagtaaatctacacagtgtgtcattccacccattaccaacccatggggattgcggctgcttgctgggagaaagcaagtaaacaggtgggcagtcaaatcacacaaagccaaacaaaatctgatactttccaacaatgtccgggttccagacaggagaacacgagcaagtgttctctcctgcaaaaacccacacagacgctttaaggactgcatgtaacaagctgaagtatctagccctaaaaagccatgaggctgaaggtaacaacaagccccatctgtattctgggtccttgtctaagagtcaagaagaagctaaataaagacccctcaagacaaggatgactttgttcactccttatccatctgcttcttcgatctgtacacagctcagctgtgacattacttgtcttctgggagcctcggggcaccctcactttcccttctttccctcatgaaccaagatccacttggtgggaatgtgctaggcacactggaagacacgtggacagtggaaccactggttccacaaaaaccacttcttttttttccccacgttattgagatggagataaatctgcatgcctggacttccaaccttaaggatcagacaccattttcacatcactgaggcaatggtgagtcaaggacagagcccaaacctagctcattcaaccccacattcctcccactacagcccacagtgtctgtgttggcaaagactgctgtgagggagctggtcgagaggtcatcagtgaaactggaacgaggacagctctcactctgtagacccaggacctacaaagaattcctcaaattcccagactcagccttcagcctggatctcaatgcccatcagaatgaaagctccaagtgcatcacaactgccttgttggtggtcgaacttcagtgcctagaacagtgctggtataaagcagacatacaataaacacttgatggatttttttcgatgaatgtctcatacctagttcagagatgttctcctcccaaagtcacctctgtttggtttgtacattaaaaaccctaataggtgatgcttattatgctttagagtcactttccaaatatgggcaagaaaaagcagagagctgcagaggggtcaacaaaagccaaaggcactgagggaacacttcaaatatatgataaactattccttccaatcaagaaagctacagcagactgaatatcccctgcaaagatgtccacaccctattcctggagtctgtgaatatgcacatttcatagcaaatgcactgtgtagatgtaattaaagttatgaacctcaaaataaggagattatcctggattatgtgaatgggcccaaactaaacacctgagcccttaaaagtaaagaactttctctgactggagacagatgtgacaggaggcgtcagaggtttaaagtgtgagagatactcaacccacttgtgggagaggagtcacatgaaaagcataagaaggaatgatggcaacctttaggagcaaaaaccagcccctgctgacagccagcaaggaaatggacttcagtcctacaactgcacgggactgaattcatctgatatcctggatgagctccaaagcagattcatcttcagagcccccccaaaaaaacacagccccacaaacaccttgatatcagccctgtgagcctctaagaagtagacctaggtgagctctactgtatcctggcttctggccttatgaaataataaatgtatgtggttataaactgctaagtatttggtgacttgttatagtagcaataaaaaaaaaaagtacaatcggaagcaaatcaatctctcgggccaaaatttgctggtccactactatggctccttcctgcagtccaaaacagattggaggtttctgtgagacaggaaggtggccctctcctcgctctgggaaaggtacatgctgctttaggaaggacccaagagaaagttaagaaaagttcacctgcccagcacactctacagcaaaatacaccttgctgagcagcaagacaaaagaagcccctgccaggtggccctgagctcctcctagaagttgttaactcaacagtacaaatacaatgagcgcactccataacaagtctccctcatgactaagtgcatttatcccacagataatatttcatatatccacccacctttgttctcatcaaaaggatatcttttgagttgagtccagctcctagaaaatacctgacacataataagaactgaataaatattgctcaatgcatgagtaagatttttaagtaaaaagcagagaacacctaatggaaactgctcttaaccccagggaactttaaaaacacaacagcgttctgacatccagtattaattttcacacaaggtacggactgagacataaataagaatctttgggtgaaaagtcttgacaatatctgagcaagaatgcagtttttcactgaaatactcaccaggaccacttcgcttggtatgagttctaacactgatctacagaagaaaacttctatcttttttttctttttctgagacagagtctcactctgtcacgctggctggaatgcagtggagtgatctcagctcactgcaacctccacctcctgggttcaagcgattcttgtgcctcagcctcttcagtagctgggattacaggtgtgcgccaccacgcctgcctggcaaatatgtgtatttttagtagagaggggatttcaccacgttggccaggctggtcttgaactcctggcctcaagtgattcatccgcctcggcccccacaatatgctgggattacaacagatgtgagccactgtgcctggctgaaaacttctatcttgacgcaattgttttcaaggacataatttctactactcatgtcaattaaattatcaacttctatttattgagcacctattgtgtgccaggccccacaccaggctcttcatatgtgtaaccaataatcacaacaaagagtcaaatatattatgtgtatgtagaagaagagaaaactgaggcttacagggactaaataatttatccgacatcaatgctggtaaaatattcaaatgcaatattcaaacccagacccagctgaccctcccacactgccatactttccccatgttgccaaaacactgctttccagagcacccagattctgaaggaggcccaggagaaactcacaatacccttggctggaaacagggaaacactcacgcacacacaaaaggagaaatgtttcaaaatatgtctctcgtgaaattccacttttggtacagaagcacatattgaaagaagagtttctctccccatcatgttgggctttgcatctccggttgctgctactgctgcacttcttggcacagttaactgcccatgtgcaatgtcatcacatgtcacatccatctaccatcacaaatgttgaaatttcaaccaagcagcaatagaaaaaggctgcttaatgcaaatcaagtatcagtcccagcattccaattaaggccctgcttaattcaataagtaagagtcacatttcaaaatgtttggaagtcatttcatcctaaagccttcctcagaaatcatctttacacaaaacaatcctgatcactcattctactctaactcaagagccccattttgaagagaggtctcttggtaacagcagaggggcagaagcagaacctgagtgctccacaaacccgagatatgcagaaagcacctggtagtagccaccttaatcaatacctggtcataaaccaacgcatccacaaggcacaaccacaacacagcaggatgggacacagtgtagctgacggttctgaaggtgcatttccctgcactctgtcacgctgctaatcctcccagagagatactgtcaggttgaaacctgagctgttaattatcagatgatgagggctaaacagtcattctactatgagtataattcaggcattgtgtgagtggagggattttaccgggttgtgtacacaataggtgtttaatgagtaaacagaagtgaaatggaatgaatgggcacagcaccggaacaaattacaatgtcttctaaaaacacccatcttttccaaaatttcaatcattccagctgaaagggtgagcatttgtcatgcagtgaagcagcccaaaacagtccaagaaaatggttttgtaacaaagttttgtaccattcataataacctttcaccctctatgattcacagcacaaaaaagaccaacaggctgcaaatgtctgcacaagtcagcttctctaactttttaggccagttacttagggttgcaaagatccctgtagagaaatataccttactttaaaattataacatgggaccaggcacggtgactcatgcctttaatcccaacactttgggaggccgaggtgggcagatcacttgagctcaggagttcgagaccagctgggcaacatagtgaaaccctatgtctactaaaaatacaaaaaatagctgggcgtggtggcaggtgcctgtagtcccaggtactcggaggctgaggcatgagaatcacttaagcctgagaggcggaggttgcagtgagtcgagatcgcgccactgcactccagcctgggcaacagagtgagacagatctcagctcactgcagcctccacctcctaggctcaagcgatcctcctgcctcagcctcccgagtagctggaattacaggtgcccaccatcacgcccggctattttttgtatttttgtagagacagggtttcaccatgttggccaggctggtctcaaactgctgacctcacgtgatctgcccgccgtggcatccgaaagtggtgggattacaggcgtgagccaccacacctggccgatacaaaaactttttgatggtcaatcaaaggtatgaatcctgaagtgtgtttctaaggtcacattctagggtatgatctgggaacagggtccagaaactgagtattcttaattctctgggaggaccaactctctataaagaattcgtgctgcacaaaatccaagagtattacaatttcattttattataataaggaacatctctttccagatacatccttcctccaggaatctttccctggttttaagagaatctatctggtgagtagaaaaccagaatcctggatattaaatgatgatgtttggggtagcgagaggaatttcaccagagctctcagaacacctagagacatatttgttctggaactatataaaacactctgatgaccaaactgctcaggctcaccagtattttttggttaagaatgaatgggtattctcatagagtgcttctctgaactattgattcctaggctgaaaaaacttcgtcggaatttttctttgcaatgttattactaagtaagctaaatagtgtggtctcatctaattccagggccttccaactgtgacagcccacaatgtcatctttatgatgggtttttaaacataaatagatatccatcttcccatcaatggtttcaagactttttttttttaaatatgaagaactctgttttcaaatgagctcttgcttagtattataatagtaaaaacatgaaaaagcaggtcttctctgattgaaacaagcacaaaaaacttttggcttaaactcagccacacccagcttattcttcccattcaccctttgggagatggcccaaaagtctgaaagaacactaagaacacttagaataccactgaactaaattatatcacaaactcccagccagccgtacttttctacaaaacaaagtcatgctgtccaaggaaaagcctcacattccgaaagcattagtgcttgaagtttctccagtgagcaagtctactcaccaggattggcttcaggatgtccatgttggaacgaagtactcgctctgctgcagccagtttctcccttggtaggccacaaagctcagaaacttcttggtcaccaagttgaatcatctcttctgattttgatccattgcacagacttgtcaaatgtaactggtagccttgcaaaaatacctggaagcatttcatgcaaagagagacaagcacaagaggattatgaagattggaagctgggtccttgaagtcttttggagaacttcatatcaatacagctttgaagatcttaaaacaggttccattgcaacagtccaatgcatcaggtctctttactgaaactcagaatgtatcaaagcacaaggcacaatgacaggacacttaaaacctgcaagttgcattaactcagtatctcccacactcttgtccctcttgcaaagaaaaatccagagtccaactcgttttcttaagagtgggacacatgatttggcaaacaggaatccagagtctgaattcctggaaccacttttattagatgaacaacatcctcactattttgcaatttatgttgtctttaagtaggactgggctgaaatatggggagaaagcatttatgctatttatctgtaagtgtagatatttaactaagacacagaactatgttctaacaatttcagaatttggaattctccattttacttgccctagagcagagtgccagaaagccaggcctcttatctcattgataggccaattctaaatcattcttatcttttctttataccaaacccactagagagcctcttcttggtcatattttacttaattgcctttctggacctaaactattctacttcatacgtggtccagtggaccacaagctttgaaagaagagcctgtttatcctgctcactttgcatccacagtgctgaaacattatagccagtatttgttgaaggaatgaacaatgcagactctttattacaccattactaactgccctgtttaaattggggcaggctgatgtgcttgtagaacaacctaaggtgagtgatggaccaaaagcctctcaaaacccatgcagcttttgaaatactgcagaacatttggcctaccatgattcccattaagtttttgctgactgccagagatactcaagcacacttcagttctactcatttctttaactggtccttgctgctaggctgtcagcctacagttagtgtctatgtttaagaatactgacaacaggccgggtgcagtgggtcatgtctgtaattccaacactttgggaggccaaggcagacggatcacctgaggtcaggagttcaagaccagtctggccaaccaacatggtgaaaccccgtctctactaaaaatacaacaattagccaggtgtggtggtgcatgcctgtaatcccagctactcaggaggctgaagcagagaatcacttgaacctgggaggcagaggttgtagtgagctgagatcacgccactgcactccagcctgggtgacagagcgagactccaactcaaaaaaaaaaaaaaaaaaagaatactgacaacggagggcctttgttgatgtcatcttctgcctctgcccaatcatgctttgttccctttcctttccttacacaagtattgatcccaagaatttttcaataaatgtcttgtatgctcaaaaaaaagaatactgaaaatacagaaactccaaggaccatccaaggaccatctccatgcttaggatgccccttattttaaactgattagatgtgacagatatgaaattggcagggggcaatggaaattatgctaaatgcaactactttcaaaagcctgatgcctttggcccatctcctaaccacacaattggtaaacacaaggcatattttcctagtttcagaagggcacgcagtaagcacatttttctaattttaaaaattctagatcatgtgaagcaaaaagcttattttcaagaataaacatttccactacttctgcttcttgtaaagacaagctagtatgcagacacgagataggggaggaagcagttcccctttctgccagagaataagctcaaaaagtgtctctgaaaaatcaataaccatgcaagctgggtctggtgctacccactgcacaagagctgtctaataatgatgccagaggaagttttctatgattctaaagttaaaattcaacataaacactaatattatttcctgattttataaaattctttttttttttttttttttgagatggagtctcactctgtcagccaggctggagtgcaatggcgtgatattggctcactgcaacctccgcctcccaggttcaaacgattctcctgtctcagcctcacgagtagctgggactacaggagcatgccaccacgctgagctaattttcatatttttagtagagacaggctttgccatgttggccaggatggtctcgaactcctgacctcaagtgattttcccgccttggcctcccaaagtgctgggattatagacgtgggattacagacctttgaagtgatctcgtccatcccacctgagctttgtgacactagtccgttcatttctgtttccccagtgccatctcacagagctaaaattggagagatttaaagccttattcccacaagctgcagggactgatctcctatttaatgcaaagcaagcaacagttctcaactcagtgccactgcgtccagcccttattttataaaattcttaaaagtctccaaatacacccttgtctaaagtctcctgtcctcaattttttagacagagctcctccagatcaataacccttaaccacggttattgcctcagaactgtgaatattttttaagtttaactcaacttaaaatgtatcccttgtaggaggaaatcatcacaaatgccaagtgataagccagaaatcaattttattttaaccagctggcccatgacgccaggttgcatattccactcctggatggtttggcaattcctgcctgaatagggaagtaaaattaagtgaagttgtattcaaactacctccctccccttcaccaccattacaaggacaagggtttattcatttctttccagtagctgcacaacgtaattgccatcagccctactgaggaagctggaggcatcagcttaccttgtggagaatgacatcagccctcagcatcttgtccacagtagactttgggagagagaggttgtgatacaggaacccagagaaggtttcattgtccaccaggaaatcttgaagcttcaagtctattgagaaatagtgttttatttttatttagtaagtaactcaaaaaaaaaaaaaaagtgggcacaatgggacagtggagaaacgttatcataatattgatgatcaacagttgcctggctaaacacacacaggaatgagataggggagcatcgccatatcaggagaggcatgaaaatattgctttctggtaacatgttgagccacactcagcatgtgctcctcaactcaaacagtgtgatggtgctgttacacacacacacacacacacacacacacatacacacacacacagcctttccttttctttttttttttttattttgagacggagtctcaccctgtcacctaggttggagtgcaatggtggaatctcagctcactgcaacccccgcctcccgggttcaagagattctcctgcctcagcctcccgagtagctgggattacaggtatgcatcaccatgactggcaaatttttttttttttatctttagtacagacagggtttcaccatgataggcaggctggtctcaaactcctgaccttgtgatccaacctgccttggcctcccaaagtgctgacagtacaggcgtgagccaccatgcccggtctttctcttctaaatgatctcacccaccccacctgagctttgtggcactagtccgttcattcctgtctccccactgccttttcacagagctaaaattggagagatttaaagctttattcccacaagctgcagagactaatctcctgtttaatgcaaaacaagcaatggttctcaaacttaagtatgcatcagaatcacctggagagcttgttaaaatgcagactgccgggccgggccgggccgggccgggccgggccgggccgggccgggccgggccgggccgggccgggccggcccccacccccacccccacccccacccccacccccacccccacccccacccccagagtttctgatacagcggccctgggatgcgactggagaatcacttacaggtgatgctgatgctgctgacctggggaccatgttttgacaaacactggcagagtgcattacgcatatcaaagtgccttcacagacatggtctcattttcattccaaacataaaacatgtgatacaaagctccaaaacccaggtctgccaggctttaggaaaacacattaacatatatttaaaccatcagccctattaaatgatttgattgctaaaggatttcatacggaatctccctaaataataggccctctgagtacagttagaaaaggcttcaatccagtgcaacaaaacagaaaaagcagcactaagaatccagaattttagtttctagagttggaggctgtgtctggtggcgtccctgcgtacctcatgtcatctttctgaacctcaatttcttgatctccaaaatgagaggtttctgaccagatgcttggtaggagccctatgactccgaaacagtatagttttccctgactcatctcatttggctgtctacctcttctccttccaacccactctcctaacagcctaacttctttgtaataaagataaaaccagctcatcaggaccacatgaactgagcccacatggccaggcactaagcaacctctagagggcaaactttgcaaactgaaatcatttaccagaagagaaacaggtttgatctgaaaatggggctacagtgtgaggcttaatgaggacaggagttaatccgcggagctaagagggtcacatgcagagataaagtaacaggagggcctgacagcccagccagtctctcataaatgctgtatgatccaggtgtattctgctttaggcaaacttcagtaatattgagttatatagacagaataaattgagcaagatttacatcgctagagaaatgattcactgctacccctctatggctagctcctagttattcctcatgacagccagtagctgttcttaggcccagttagtgtccctcagaatcagtgctcctgcaaactgctacctacctgatgcttcccatcacatgtgactctacactgttagcattaggctctctactgcagttgtcaaacctcagagcacctaagcttcatttagggagcatgcgaaaatgcagtttcttgggcccagtccccagagattctgaaatagtgggtctagagtgcagagcctacaaatctacatttgaataagcatcccttacacttttaatgttgggggagggaggtgtggaaccacagtttaaggaacattgttttacttgcatgttgtctctaccagactatgcctataggatagggaatatgcgttcttagtaccaccaatgcccagatcaggcctggcacagaattactgcccagtgaagggtagctgaatactaaacactaggagatgggattagggctgacaaggttccaaaagtatctgagtaccatcataggagatttccttttagctggccaggtccaggaagagcccagggatgtcaggaccatccccaggccacaccccaggagtgaacaggacttctaaccactggaactgccttcccaggaacagaaagcgacatccggggtcactttctgttcttgggagaaacaggaaggaaggtgtaagctggtgtcttcagttgaggactggtgtgaaaaggtagacattaatcactgtacaaccatggaaaaagcaccaccctgggagtcagaaacctgggttctaaatccatttatttgtcgagtcatttcatgtagttgtgcctccactgccttatctataaaatgaagggtcaaaaaaggcctctgtgaaacctcaacagaaacagaatacacgtattagctaaccctcactgactaggtgggccatagcttcctcctgagcagagccagagcaatacatcatattgcaccagggaacttcaaaacagctccctccttcccaagcagggtggcagaagtgtgggagggcgacccaggccacccctgcaatgggcctaggtcatcctgcaacactctccagaccagtgagtgtgctcagcatgtttataagacttctgttatgttaacaggctctgaagatgagaacatctggatgtgatcaagctccagcctcctatcagtgaatcccccggatgagacataagaacccagagactgattaaacagtcaacaacccttggctgtgcacgtgcatggtgtggtaggttcgctgggttgggaagcagcagggagggccaaagatcctccactacaaagaacttgcagcctgatcacgtggatatccacccatgtaggcttagactcacacactagcaccaacctgtgtgaaaacaggaaggcaacatggtgtagtatactggttctcaaacatgactgcccgttagactcagctgggggcttcacaaaaatcccaaagcccaggccacaccatggagcaactaatgagaactgctagggtaagacccaggcatcagaatttaataaaacctggctgggtgaggtgggcagatcacttgaggtcaggagtttgagatcagcctggtgaaacccagtctctactaaacatatcaaaattagctgagtgtggtggtgggtgcctgtaatcccagctacttgggaggctgaagcaggaggatcacttgaacgtgggaggcagtggttgcactgagcagagatggcaccattgcactccagcctgggtgacagagcgagactctgtctcaaaaaaaaaaaaaaaaagaatttaataaaatttttcaggtgattgcagccaagtctgagaaacaatgatgtgggggaaacatcagggtttgggaccagaaaaacctaaatttgatactgcactctcctgtgaaatagctgtgtgactgtgagaaagtgactttacctccctgagcacaaattttcttaccaattaagtgaaggtaatagtatccacatttcaaagatatgaagatcagagatactcatcatggtaggtgctcaatatatggtaataatttgtgattatcaaaaagattttttcactcaactttaccaatgtacaacaatgccatttatagaaaagatggggacacagtccctgccttcgaggaactttcaaggctgaaaggggagataaagaggcaaatcaattcaagaaggcagaaggaaggataagcaagccaaaaggagacagtaaatggaagcactggcccaagatgaggtttatctgtaagtgcttcatggcgagcaaccagactggagccaagttctggaaaaggacagagtcaaaaatccctagaagtggctggagaggaaggggtaagacctctcatgatgacaacgaccaggacattttgtggtcataatgctatgcacatagtagattctcaacaaatgaatgaacaagcagataattagagaagagatttctcaaaacctcagatctgggtagtaggaaggggagaaaaaaggagggggtgaggacagagtacagtggctttgtatctgctggtctcagtcttctcccctatgttgctggcaggaaaatgggtggaaagccaagaatattaagaaagccagatgtctgaaacataccttctcctcttaccccatcctcatgacatggcccatgagtcacctcctccaggaagcctgccctggccttcccatcctcaagctgggttaggtggccagcccttttttgtgactttttttttttttaatacagagtttcaccctttcacccaggctggagtgaagtggcccgctcttggctcattgcaacctccaaagccccaggttcaagcaattctcctgcctcagcctcccgagttgttgggattacaggcacccgccatcacgcccagctattattcctttttgtatttttagtagagttggggtttcatcatgttggccaggctggtcttgaactcctgacctcaggtgatccactcgccttggcctcccaaagtgctaggattagaggcatgagccaccgcgcccggcgttttgtgactcttttgtgcccaacatcctatgttttccactagtaccacacagatcaagctgcagtcacccatgtaaatatcctgctcccagaagaatagaaattccttgagggccagggtttttaattccaaagccagcagtgcctggcacagaggaggcactcagtaaattggatgaatgaatgaatagatggatggatgaactaatgaatgaatgaatacaaatgagtgaataaattaatgacctgatgtgatttggggaattgccgattgcagagaagaaaattcaccttgcagtgagttagggaaaagatgaagcaggacatgaacttgaaacaaaccaagtaaagaggacacaagagttctgctaaacccactcagccacgtcagcccagatcaagaggagagtcaggtgagtggcagctagaagcagagtggggaacaggagagaggaaggctgagttgattaaatgataaaatggagatgacaatggcatccacctcattggactgagctaggtgttaaatgagcaaatgtacctgcagacctagtataatgccgggcactgagtaaggtgcccggtaaaggatggctaatatcatcatcattttcaggaatgactgatctgaacagattcatggctaatttaaccttaaagcatattcagaatagacaagacacagaagtggctttggcggctaagttgagatgttgaatttgtgatctaaggtatgcacatgtgtgtatgtgtgtgcatatgtatgtgtgtattataatacatattagcctggctgagttcctaagacagaattattgagttctttctgctgatactatctataaggtaaaggaaaggttgaagctgactgatttgtctactcataactttatgaaagaataaataaatctagtattttacagggaatcaccaggaatgatcatatccaccagtcactgcaaggatggatataggtggaagatgacctggacgaaagaccaatcattccacacaagacagggaatacttcctgaacaggagagtcatttagccacttaactttggccaatgagttaatgcggacctggattttataatcagtaaaatgtgtgggttggagaagatgatctctgaggtcttcttacctgacactgaaaggaacacagggcaaaacaaaatcagcactggatacagcatcacagggtctgaattcaagagtcagctctgccatttcctgactgtgtaatcatgaagctatactttcccccctatttaaatctccctaagcctcagtttccttggatataaaatggggctaatacagcactttgggaggccaagacgggtggatcaactgaggtcggaagttcgagaccagcctgaccaacatgaagaaaccccgtctctactaaaaatacaaaattagccgggtgtggtggcgcatgcctgtaatcccagctactcaggaagctgaggcaggagaattgcttggaggcagaggttgcagtgagccgagatcacgccattgcaatccagcctgggcaacaagagcgacactctgtctcaaaaaacaaacaaacaaaaaaaacggggctaataacattcacaggttgttgtgcaaaccaaagatcaagaacgtgaacgtgctgtttcaggggaaaaagctgacttgctccaagtgttcgctcgggtaactggaaggtatgacctctgtcacaggatgcggagctgggctactgctgccagcagaagagaaagtcactatccagcagaaggtcaagagggctctcccaccacagtctcttcaatacagaccaaaatacttgacctgctgagctcagcctccttggttttgcctggaggagcaaacagtgacctaccaattagccaagagcttctgtaaagtggggcaaaggaaaggaaaaagaacaaaaaacaggtgacatgtgtgtttgtgggctggaagaaacgaagcagaaccctcagcttcttgccacacatccaggcctctgggaccaagccggggaaccagctgggacctctgggacccaggtccaggcctctgggaccaagctgaggaacacatttgcacgtgcaggcggaggggtatgacgcggggtgggggcgaggtcctgctttccaggccattcagtgttccttcagttctctgagcatagaggacaaggaaggtgggaggagggaggagagggaagagaggggtgaaggagcttgggggaggctgggaaagaaggaggaaaggagaggagggagagcagctcaggaaggcggaggaggaaagccctttgctgagctgagctgagccagacggggttactctcggtcagtgccctccagtccccagctcaggtttcaagatctgtcttctcttttgctcaacatgaaaaggaaccagagcaatcagctgctttagaagtgggtggaggaggcaaatgaaaaaaaaggagaagtagggaaaatcacatcagcatcccaggcccagatggtcttcttcaatggacccctggggtgggggtggggtggggcctcccagcctgctaggagctgtcaactgagcagggcctgggagcgggagacaaattctaactcgtggttttaatcagcctgagcttgtccagccttacaaataagaccttgaaatacttctctgttatacaagggctggtaacaaatacactccagtgtctttatggtatttttttggtgttttgttttcctgatgctctgctgtcttcttgaagaatagacgatgcctgcttcaccaatagctgagcactctctgggaagacctggttgttgggtgctgaggagaaggggtgaggcggggtgatgcagctgctccttcaggtgactccttagagcaggggagagtaggccaggggtgtgtggtacacacagcctaaggacacccatgctgttcatcccggcctgggctttccaacccaggagacacttccttctctacagagaaggctcaccgagggataccaagacatacctgaaaaaactcagttccagaattttccagttatgtggccttgggaaagtcagttaggctctctgagcctccatttttctgtaaatggaggtctagcttcctatacgtgtgggttaagttatcactaatgacactaagtgtgttaagtactctgaatgctgactcacacatactccttgagaaaatacaagctgaaaattaaacatgttcaaaataaatgtggataaagtcatagatgacaagctgtgaagaattcccaagagaaaccaggatatttaggcttatgctccctgaaccttccaaggcattaggaagccagagtcttctctttcaaccaatgggaataccataactttaggaaccacacattccttctagtattttacaaataatataaacttgtattagttcaacaaacttctgaatggctacagtacccaaaatactagtgttgtggttcaaagggataatatttttctcagtgctccttgaaggcaggagctagcctataacaaaagaggcgctgtgtaacaaaatccctgcccttgcattctaagaggagatggccagagggtcgggtgagcagagcggtgagcctccaaccctctctgccactccagaatcagtcagcactggaatcaggggtggaacgagacattactcatcttcccccagattactttgctagtaaggcaatagcacacctgctatgatttgaacgtgtcccccctcaaagttcatacattgaaacttcatcaccaatgtgacagtattaagaggcagggcctttaaggggtgattaagttatgtgagcagtgccctcaccaatagcattagggcccctcacagataccatgagtttcatgtgcgtctgtgtgaagagaccaccaaacaggctttgtgtgagcaataaagctgtttttttcacctggctgcaggtgggctgagtccgaaaagagagtcagcaaagggagataggggtggggccgttttataggatttgggaaggtaatggaaaattacagtcaaagggggttgttctctggtgggcaggggcagggggtcacaaggtgctcagtgggggagcttctgagccaggagaaggaaattcacagggttaatcactcagttaaggtggggcaggaacaaatcacaatggtggaacgtcatcagttaaggcgaggcagggccttttcacttcttttgtgattcttcagttacttcaggccatctgggcgtatatgtgcaagtcacaggggatgcgatggcttggcttgggcttagaggcctgacaatgaggacccctataaaagggcttgagggagaggcttcagtcccttctgccagttgaggaaatggcgtttgtcccctcctaaggatgcagcaacaaggcaccatcttagaagcagagagcagccctcaccagacaccaaacctgccaacaccttgattttggatttcccagcctccagaactgtgagaagtaaatttctattgtgtataaattactcagtctcgagaattttcttctagcagcagaaacagaataagacaatacccatgtcttactgagaagagggaaggtgggagaagttactggaagtccctagaatgagggttgaagaccctgaatggtaacaattcccccaaagagccagtgcagccccagagggaaaggatgtcctggtcacactggccagggcgtggaagggcacagtcagcctggctttgaagctcagaaggaaatggaagataacactaagacataacattgacccaaatgaattttggacctgaacagaatgagaagaagaaacaaagaaccaacatcagaaaaagcaagaagatagctgagatgaaaactctacctgaagaccagagaggcagaaaaatgagagaggacagctggaagacaaaaggagtgaaaagaaggtaagagataggaagtatgaagaaacagagtccagaaacaggaaagactacatcaaacagaaggggaagagagaaaaagaaaagagagtttgaggcattcagttcccaaggatgagctggtctctcactgaaaaaagggaccagacacttcaaacaccacacaacatgggactagaatcagcctgcagggccctgagaagtccaggcacaaaaagaacggaaaaagatgagtttacaagttggggatgagattcttcctaaggctggtctagggaagaattaacatacacaatgtataaatagtttaatttttttctaacttttaaaattaacaaaatttattaagggacatagtagtgctttgtgggcacagaaaagtgactcatatttaccaagcattaggcacactattagcattattttccagaatctttaagaacagcctataaagaaacgtattattattcccatttttcaaatgaggaaacagatctggagaatatcttgctcagggtcatagaacaaacaagtggtaaatttgaacccaaacagctttgactgcaaagctttggttctttccactatatcagcaatttaatgagatgttttaaaaatgcttcatcgtgatattggcctcaaaagctggggatggcacctatgcttcctaatgttggaataagcaacatggcagcatagtgtggggagaaaatgctaagcctaggagtcagaccccgattcaacgtacaactttactctttaatcttggacaacagacattaccctttcgagcctcggtttcctcatcaatgaaatggagataataataccaatttgcccctgctagtgctgtttgaagccttcaatgtaataatatatgaaaaatgtaaaatggtatcattatccggtgcaacttagtctgttgaatagtgtcgcactgagattgccttttggtgcctcaatgcaacagtgacaagaggaccagaaatgggaaagctttcaatgagaaacaaactggactcccaaattgctctttgccacccacagaataaataaaccttatgctggaaaagcaggagacacgcaacactgttcttgatgttaacaattcaaaactttttaaaggcagtctgatatttgtggggatacacactattctgtaatcgaatgcaattgtgttttctattcttgtctgagtaaagctgatctttgatttgatttagttcaagtaatatttcaacattgcagtgcagcgttgctccccacccccacctgcttacagcccagctgggcccaggcccttgccctggatggaaatcaaagacctggtttctgagatgcagcctggctttgacaggtctgggaaaactcatggtagtggaaaggtttccaaatataaaattctaaggcctcaaatcaaaacttttgacaagtgcatacatacagaacgtgaattgcaatcacctaaagatttcaaagaatttccattttgatgacataatgttgacacatgtatcaccagatctcccaacaagatgacacactggggttccacaaggacagaaaatatagtctgaggctgtaacctcaactttagcagctgcctgaatgggtgagggggttcagacagaaaatgagaagtggctgtgagtcacaggatgttctttctagatgggccttgggaaacattccatcggtgcctgaagccaggaagtggagtgaatctggcatttctttcagaagccctcttgtctcctttctcatcccagccagcccatgccccatgtcctgtgactttagggaagcttctggctactcagagctgctctctttaggatataacaacaacagagcacgagaaactggaattctggtcctattactgccccttgccagctgtgctttcttaggcaagttacttggcctctctgaacttcggctccttcatgtgtgtatcccctgcattttatgatgattgtaaaaatgcagtgagcttaagaacaagcctggtacctatgctgggccaggcactgtactaagtgcttccccttattcgtccattaatttgccacaatagtcctgagggaggtactattgttattccatttgaggaaactgaggcacagagatgtatggaattatccaaggttacacagctgataagcatcaagccaagatttgaacctaggccatctggctgccaagtctgttctcttaacacgaaggtatatttcccagggaatatttacaagatgttaattttctacccacttccctcaactccctgccacagccaactatcttgccatgtcaccaaagccaccctgctccctggagctcacgtctttttgattttcaaaaatcaaaccagaatcaaaggtccaccccactgagtccttagtactatcagtaaatctgacagccagagaggcatgacccttttccctaagtaaaatccagtataaccctggggactaatttccaaaaagattagtcagagccatatcagaaaggccaaacaggctgggcatggtggctcacacctgtaatcccagcactttgggaggccaacgcacctgaagtcaagagttcaacatggcaaacatggtcaggagttcaaagatggtcaggagttcaaatggccaacatggcaaaaccccgtctctactaaaaaatacaaaaattagccaggcctggtggtaagtgcctgtaatcccagctattcgggaggctgaggcaggaagaattgtttgaacccgggaggcagaggttgcagtgaaccaagatcgtgccgctccactcactccagcctgggcaacagagtaagactccgtctcaaaacaaaaacaaaaacaaacaaacaaacaaaaaaacagagccgggcgcagtggctcatgcctgtaatctcaacactttgggaggctgaggcaggtggatcaacaggtcaggagttcgagaccagcctgaccaacatggtaaaaccccatctctactgaaaatacaaaaattagcagggcagccagccgccccgtccgggagggaggtggggggcagcccccgcccggccagccgccccgtccgggagggaggtgggggccagcccccgcccggccagccaccccgtccgggagggaggtggggggcagcccccgcccggccagccgccccgtccgggaggtggggggcgcctctgcccggccgccccttctgggaagtgaggagcccctctacccggccgccgccccatctgggaggtgtacccagcagctcattgagaatgggccatgatgacaatggcagttttgtcgaatagaaaagggggaaatgtggggaaaagatagagaaatcagattgttgctgtgtctgtgtagaaagaagtagacataggagattccattttgttctgtactaagaaaaattcttctgccttgaaaaaaaataaataaataaaaattaaaaaattagcagggtgttgtggcatgcgcctgtaatcccagcttctcaggaggctgaggcaggagaatcgcttgaatccaggaggcggtggtcgcagtgagccgagatcacaccactacactccatgcactccatcctgggcaacagagtgagactccatctcaaaaaaaaaaaaaaaaaagaaaggcctaacaagccagattcatgccatgaacataagggaagtggcagctgagccactgactccacacaaaagtgcagctgaagggagagagaaactccatactcagtcgggatggcaggctgctgccccggatctctctgccagtcctgtccctttccgccccttgacctcaacaaggtgatatgtcctccaaagggttcatctccagcacagtgacaaaatgcccaaagatatttcttatcttttcctggcaaaatccttataagcttcagagagctccacaaccttaaaaaaaaaaggtatttcagaatcccccaagtcaggagccaaagtaggccagttgcagccctagtcctcactggagaaggcaagataaggaactccaggccatggcagagaaccatgtaggctgtgcactattcaactcaaatcatcacagttctcatggagagtgccattcacagggaccgcggtgtgtatgtacccccagaaacgtgtgacttgtcagccctaggaacagcgtgaaagccatccctacccgttctaggcatattcagcaggtctagaaaatgatctttgcggtcccacaaaacacttactgggcttctagagttaaaaggtactggtgtggccataactttggacagggcaagacacctgcagagctaagatcttgcttgactcagaagttgctgagttccatgtacagtagagagaggctacctggcttccagccacaccatagaatccacagccctgcccacaccacttgggtcatgccagctaaaaaaagatggagaacttccccagatgccccacaagtctaggaattgtttccagaccagcataagcaatggcaaggctgagggactggctatgggggatgtagcagtggacaagagcctcgctaagtgtggaaacggggaacagagggaagctggggaacttctcagaggggatgtgaggacgccctatcccgggaaggcaagaggcttcagctccagcatatgcacttcccaactatgagccaagtaggacgtcccaaccactgcaaggaggtacctgctcaagaggggactgtgtccacagtgcaacctggagttgaatgagagtctgtagtccagatttcagaatatgggagaggagcaggccttgggaccaagtggatgcctgagcggaaatgttcagtaggaagcaggctaatgaacccattaggtatcactaagcaatacattttaagtagctgaaaaggaaatacacagtaaaaataagacagcaaagggtcacctccttctcccacccagtcatgattctcagcagcaacaaccccatcagaaaggccttagcttgggccagtctgcttctcagcccacctaagaatgccagattcaccagagagggggcacagcgatggcaggtggcttggagtggggagtgaggatgactccagggcaaggaaggaagctttggaaggggagcagtgcttcttgccccaccatgccctggcaggagcagatgcaggtgggggcctgaggctgacacaagttggtagggggctctctttttaaaacaagatagtatttttaaaaaatcttacttttgcaaaccttacaaaaacataccactgtgtaaacatattgctaagacccccagagaggaccttgaaaggagctatgaaaaataaagtaaatatttttagcttcccagtaaatctactttaggcctctgggttcatggctgcccttccagaaagctctggggggcaattttgtgaaagaaagaaggccaagactttttgaagaacttctgtcatcattattattcgtaggctctgttgacctgggctaacacaagggaataaactatataatacaattttttaaagcacttttacttgaccctcacaataccctgtgaagtacaggtattttattttctcccaccttcattccacaaagattcactaatggctcaccatgcacccactactgtgctggggcttaggatggaaccatgagcaaggcgcccaccttgccctcaaggggctatagtctagcagacagcccacatccttgggtagtcccaggtgatcccccatccaagtactgaccaagtttctgggctgaagcattttctggttgtttcaccaaagaaagttccaatttcaaggcaaagaaacttaaggcccagagaggccgaacaagtggcaaaggccaaacagtcagccaggaacagaaggggaagcaaagcaactcgaatttattatgtgtcaactgtgggctatgagcttcactatcagtcatccacagacatcatctaatttaatgctcagtgaccctcagggcagctaatcttcaggtaaactctgggccagaaagaatcaacacatgcccaaagttcacacttcatgagggatgcagcatggatttcttcccaaaatgaatcttaatacaaaaccccacactcactcttataccaatgttttccaatcttcaatcatttacaaactactctcacaagttttaccatattcacagaaaatgtttcttttgaattaactttaattatatttttcctgttgaacatcctcctaagcaataatttccatgaaattgcaattggatgtgggttaaaattaaaagttctcatccacgtactgcctaaaatcatcccagataccacacaaaactcacccagagaaacacttatctctgccagtctgtatctcacagagacaaaatacagacatgtcactttccctagggtttctgaggatttatccaatttttacatctgagttgcagtcaccataggtatttaagatgaatgaatgcttctcacactgccttgcaaacattaattaatttagccaccacaccactcaacttgtgtgcctgtactctggtttaggaagaaaataataaaatgtctaaaaagttccagtgatgagaaaagtgggtgaggcaccctgtaagacttcctccttggatttcttattaggatgatttcaaggataattaaaagatttgtccacggcttaattcctgaaatgggagttcttcccagttgaaagattattaaaacagcacaatagagcactgtagaaggagaactgcctggagcagcaggggggtttagccgtgatttattcccagaatatcccttctgtggttgtgtagacttgggacagtcacttcccccttctgggtcagattcttctctagaatagaaattccatatggagaggggccatatttgttttggacacctctgtgtctcggcacttagaacagtgattcgcatataggagacgctcaatatataagggttgaatgacagaatcaactaatttatctataaatgaactaactggtctctaaggtctcttccaataagtggaaataaaatgatgctctagccaaggaaatcatgagagtatttgagtagagatccccatatctacaaatcacctgtgtatagtccagcgaatttagcagatgcaagctgaagggaagaacaagataaacttcccaactggatcacagaagcaggagcccagtggcccagcactgattacaatataggcctgagtggtagtgtctacagaatcaagaatcacttgaacccaggaggcagaggctgcagtgagccaagattgcgccactgcactccagcctggtgacagagcgaggctctgtcttaaaaaaaaaaaagaaagaaaagaaaagaaaaaggaaattagtggtgttttaaggcagtctcctccactaagatcagaaagtctgcttgacaacttacccccatcagccagtctatttcaactgctgcataaattgcaaggcagaagaacaaggccaggtgctcagaaatgcatcactgtcttagaagaatactggctctcatttattgggaatctactatgtgccagatactacattaggttttatagtttacatttcaagttagctgctattttatagttgaggaaaaaagggtctacaggggtggttagtctccactggactgatccaagcttcaagtctttgtcccacagttatcgatgactggaatgaggccaaagagagttgtttatcacatctctagatgacgagaaaggagtatcagatataatacatggcaaaatcagaatctaaaatggttttgggaggataggatagcatagggaatctaaacatgtaaaacagaaaaaagacatttttccctttagttcaaaaagccaacaatacaacaaagaaatggagaacacgtaacttgcaattctgcctatttaaaataatcacaattttgtttgagtgcacatggaatatgagtcaacaaggtgacgtgaatgccaaaatgcctaatacaatctcagactgcattaacggaaatgtagcactcagaacaagggaggcaaaaatcccttcctcctctgtgccagaatactttcataatttccagtaaacttcaagaagcacacagacatactgaaacacaaccagaggagaggcagaaatggggaggaaaaacattccataagaggaaaggaggccattttgcctaaaaaatcatggactttgggaaaacagggaaagaaaaacatgagagctgtcttcgactatttcaaggaaaacagaattagacttgttctctagaaagcataacagggtggtgaatattttctaacaattagagctgtcaacacccagaatgggctacttagtgagtggtagatccccgccctgggaaggtgggtgtgtggtaaaggaggtgaatgaggacaaagctccaaaccagatcagcttcaaggatcctcccagccctgggagagacagcacaggagggccaagctcatcatgctgtgatggggtgtcagtgcagataaacacaggtctctaagtggggatccatactgacatatgccagtctcagcttctctccgaaattgacaagagtgctattcgcaatcagcaaaaagttggccaggtgcagtggctcatgcctgtcatcccagcccttcgggaggctaaggcaggaggatcacttgagcccaggaattcgaggctgcagtgagctcagtgagctctaagggcaccactgcactctagcctgggtaacagaaagagaccctgtctctaaaaaaaaaaaaaactaaaaataaatttaaacaaataaaataagtaaataaaaacaaaatcagtaaaaagttactgatttcctgtaggaaaaggcagtgtttctgtgcatttccccctatactgaagcctgttttgtgctgcaagacaagcaaagaaagaaagaatttaagaaacagctgcaaggcagaaaaggggacatactgcgtgaacagagagatgtaaaacaagcactgacataataatacactcaaaatctaagggaccttctctcctcagagctctgcacactactgtagggtttttagatacagatttggcttcttcaccacttaactcatgtctccagcttctcaaagaaggccaggcatggtggctcatgcctgtaatcccagcactttggaaggcctaggcgggcagatcacgaggttaggagatcgagaccatcctggccaacatggtgaaatctcatctctactaaaaatacaaaaattagttgggcatggtggagcatgcctatagtcccagctactcaggaggctgaggcaggagaatcgcttgaacccaggaggcagaggctgcagtgagccaagactgcgccactgcactccagcctggtgacagagcgaggctctgtcttaaaagaaaagaaaagaaaagaaaaaggaaattagtgttgttttaaggcagtctcctccactaagatcagaaagtctgcttgacaacttacccccatcagccagtctatttcaactgctgcataaattgcaaggcagaagaacaaggccaggtgctcagaaatgcatcactgtcttagaaagaatactggctctcatttattgggaatctactatgtgccagatactacattaggttttatagtttacatttcaagttagctgctattttatagttgaggaaagtaaggctgaggggttaaatggcttggttgagatgtcaccactccaaaaaaaatcataattcatattcactaagtgcttcctatgtgccaaatactgtttttaagcaattacatgttttatctcattaacaggtaagaagaagtggctgaaagggtgctaactaacctattcacaaagtcatgcagccacagggtaatgtatgctagcactttcctctgcaccacgctgtctcttgctacagaggtaaaggaaatatccccagctgtgcctctggtcaatcagcaggggctctccagtaaataaggaaggactgaggctttgatcaggggttgttgctacctttctgtctcctgcaccagaagaaacatccatgtgcaagaccaggacctgcaggtcaaggaaacagcatctcgatggcctggctgcacagccaggagttgtctaagtggacactccaagcacagccatacctctctctgctgtgaagcagcacctcctccatgccacccctaagacagctttgcttccctttgtcatcaggtcccccattgcccattgcctcttttactgcccaaggaaagcacagttttgtagcctttaaaaaaaaaaaaaaaaaaaaaaaaaaaaaaaaaaaaaaaaaaaaaactcaaatctgagtctggtttaaactctagaactttatcatttcttcttttgccaaatagaaaacaaactggtaggcctttcagcaaaggccagccaactccatccctccctaaacaccaaacggaataaaaagcacttccctggagcagtggcagccattggtccatgatggggaggagtaatttatcactgacattgtttagaaccaccggcgcatgataataataaaatgcagaccagcttttatcggcttcattattgcttctacattctctacagaccatgcacatgccattactggctgcactcagccagctgctcccaccagcctctgtccccttgccaggccactgcctggaaggctgctctgatgctatggcagccaatgcctcagtcagaaaatgcccactccccagatacctcctgggtggcacacaagaaattgcctggatacttaccagatcagaggtaaagatttcactttttaaagacaacaagttcaaatgcccatcagactaattgaaatgattaggggaaaatgaattgcattctctttttagaaagaagtgcttaactttcacttatccatatcaacttacaactgtaattgctcttatatgcacagaaatactctgtctataaatccattcactgcaaccatatggccaacttcagaaaaaatgcagttggcagcaatctgcacccctagctgtccctaaggccaagtctgtagtattcttccctggggacttttcttctgtcttcccagagaagattagtacatcactgtctgtggcaaccagctcccctagtttcttcaccaatgcctcctggagaggggccccacaggccagccaccaaggagaaaaaccccttggggaagatctaatgggaacaagccccagacacctgggctactctctttccctggtgcaggtcaatttccaattataaacggatgcagagaaggtttttacttacttgagctggatttcttgatctgctgtaatgttctcagaactttgcgcatgtccttcatgctggtgtctttctggctgtataaaagaagcctccgagcatctgagaacaggcgagccacactgtaaagggtgcaagaaaaggcgaaaggctttagctaggccaactgcctctgctgctttacagaagtgactgccaagtgcatagaactcagcctggctcccaggtcctccacaggctggccctaacccactcccatggctccccacacccagctccattcatcaccatgttccctcccccacccatcatcactgccccaaatgcctttctccattggtctacacacccaaatcttaccacccttcaaggcccggctcatcatgcatgtgcacacacatgcatgcacacacatgcccccagggccaacttatccatgaaccacagtaggctcagtggcctgggcctgggatactcttaagggcatattagaatgttttaatttattttaaaagcagaattaaaagttaatacactaaaaatgtatgaataatcatgaatctggtctggattatattcatctttataccaatgcagtcatgaaatataatttttaatatttgtgtatggaaggggcccatggaggctacaaagccagtctagggtccatgaacatgacagtgtggccctgcgtgccgcagctgcagcttcctcaggattgtcctgagccacatcccatcgtccttactccgtcctaactcacatcacggtcctgtgcatttgaagaatcctcaatgtctcatttgggggacacttattatgcccatacttatgtccaggcactgaagccaggagccaggaatacaaagggaaggggcagcatcctgctttgctcagggagctcacactcaggggagaaagacctgcagacattgtagtctgatggggcagtgacagaggtgagagaggtgacctgatgcagagaagacagaactcccctagccttggctgtcagcttcttatgggcaaggacccttccagcatgcatctttgtgccagcccctaccctctagctcctagagccagcccattcagatgcacgtctgctgcatgatatcattaacaacatatagtatattccaaaatagctagcagacaggacttgaaatgttcacaacatacagaaatgataaatactcgaggtgatggataccccaaataccccaaattctccaaaattctcccttccctcattctgcagactctatcacacaagcatttacaaaaacaacttcacttaaatccagccattcaaaattctccagaggacaagaaaggaaggaaaaggattaactgacaagtttggaaagaaaacctgatctgatacttacatggatttgttaaagtttccaacaactccgggagcctccccaggagtcgggtaacggaaacaggggttgttggcattacagataatcccctgaacccaaggaagtgttcctgcagagggcatggctttatttggaaaatggcctgttgaaatcgaggagtagaaaaacacagggagaaacattaattccctgaagcgattttgaggctccatttatacaatgcttcatgccaagtctgtccgtcccattccccacatcccagagacctgtctcttctgaataaaactgactctcaggtggaaacttggcctcacatgccattcttaatctagtggacatcatctgtagaatggggttcatgataccagcgttggagaagtgatgagaggggtcctaagcagaaagtccctggcatccttagttcctctttgacagccagcctcagctctcagacatagaggggacttggggatgccctaagcctattttttcatactctaaggaggtaactacggtaagatgaagtgggctgggcacagtggctcgcgcctgtaatcccagcactttgggaggccaaggtgggcggatcacctgaggtcaggagttcaagaccaccctggccaacatggcgaaaccctgtctctactaagcatacaaaaattcgatgggcttggtggcaggcgcctgtaatcccaggtactctggaggctgaggcaggagaatcgcttgaactcaggagggggaggttgcagtgagccaagatcgcgccatttcactccagcctgggcgacaagagcgaaactccatttcaaaaaaataaaaataaataaaataagataaagtgactgacaaagaacactcgcaaagtcagctggcgtgactgggagtagaacccccatctccatggtcccaatccaagcctcttcctcacacctgcggttagattggaatttagctcatctcaaacccctctggtactctcctccatctgccaaacatttgtcagtttcacctcctctgccagctacaaagctcctcaagggcacctgaaaaacacacaggcttggggtctgatgtcatctgtgaagcttcgggggttttgttgttattattgttgttttgtcactaattaaaacaatgaggccccatgcactaggtcatcctcttgctctcctctttctttcttacaatgagcttcttaccaaaaggatgatgggacatatttgggcttggtcctaggattcggtctggcacagtttggtttgcggccgtaatacatggatgctgcttatgaggatcaagattaataggccctggacgaggggctcttaacccaaggacctgttcaggtatggacagaaaggccagagctcctgcttctatcatattctcagggctatttgtgaccccaaaagagttcacagttatcaagaaccacagctctaggtggtgaagaacaagtagcttcacaggctttggagtcaaaccaattggaattcacatccagtccctgcagcttgctaagcagtgactttagccaagtcattgaccccataccctcagttttctcatctgtaaaatggtgataaaagtacaattaacttcacagagctgtggtgagcatcgcatgagaccttgcaggcaaagcgtttttgcagagtgcctggtgtaggacaaagactcaacaaatgagcctatgaggattttccaggcactgtgggagtgaatctaccccagcacttactctgctgttgcccagcaggaacactccttccatctcacagctaccacctccctccaaagtgggaaccttgttttattcatctttttattttcatgcaaatgggctgagaagttaatccaaagtcaggacttgctgcactttgcatttcaatatagggtctttctttcttttctatccatactccaaccagagaggcaacacccaaagcaaggatgtgataagatctgatcactgtggccaccctctgcagggactctggcctattgaacatttacacagttaatctccctatcttcctgttaatagttcaaggaaaaccaaacaaggccccttgcctaagtcagctgctcttcattcagggagatttatgtaacccaaccaaatactcaaaggaccaaaagattctcccctttcaatgccaggagacactggcactgtagacagactggcataggtgaaaagcagcacagggcagtgatggtgaaggtatttcaggttatcccttagcaggggtggcaaaggcccttccttgtacgttgtgccccatcctatttgcaaacaaaagtaggatcaggactaggcagtgggtgtacaggaagacaagtaaataatataatgggctctcaggacccagggaagtttttaagaccttgataactctggtttgaactggggaagatttacagagaatttcaaaccagtcctttgttcctagggacaagacacctctccaagtttcaccttaacttttaactctgctcttccaactaggtccctggagggtgatgagaaaagaaggtaaggttgcaagaagtgcatggatatggccgggcatggtggctcatgcctgtaatcccagcactttgggaggctgaggcgggcgaatcacctgaggccaggagttcgagaccagtgtggtcaacatggcaaaaccctgtctctactaaaaatacaaaaattagccggacgtggtggcacatgcctgtagtctcagctatttgggaggctgaggcaggaggctcactggaacctgggaggcagacattgtagtgagcggagattgcactactgcactccagtctgggcaacagagcaagaccatctcaaaacaaacaaacaaagaagtgcatagatgtaaggaaaagtctcatttaccatcagtatatacaagaatttcagaacttttctgaaaatttatgatctggagtcagaggaatctaggttaaaactcaacaatctgcccaagatcacaacctcggtgaagggcagaggcaggatacaaacaaaccccaacttgtctgatgccgaagacatttgctatttccactacaccatcttgcctgcttgtaatcattccagaaaatcattcgtctagtagatgaaaaaactgagtttgcccttgaaacttatacttcagtggtgcttggcataatgcttaaataaaatctaaaatgtatttgctcatcaatcaaaaaaatctctttggggttccaaaagagaaaacagaattatctcacaggcatataaattgcatataaatttcagtttatgcttttttttttttttttttttttgagacagagtctcactctgttgcccaggctggagtgcaatggcgcaatctcggctcactgcaacctcagcctcgcaggttgaagcaattctcctgcctcagcctccccagtagctgggattacaggtgtgcgccaccacgcctggctaatttttgtatttttagtagagacgaggttccaccgtgttggccaggctggtttcaaactcctgacctcaagtgatccacccaccttgacttcccactgtgcctggcccgctcttttcttttttgatgaaatcaggaaatcacgtctcagaaaatgtttcttgaggggtgtgtgtgtgtgtgtgtgtgtgtgtgtgtgtttaatatgactatgtgtgatgtgcattagaaaatcagcaagtaaataactgttgctatatattgtgagaaagatgggaccaggccaagaaacacaattaaaaggtggccctggccccactgctttcctggaagaacagtatctcataagcttgtgggtctcgtaggggtatggactgagctgcttagtggtaggaaaaatcactagggcagtgaaactgaagtcccagctacatttcccagctacgtaaatgttgatcctttagatctggccatttctgcagtgtcaatccacccactgagcccagccctaagagaaagactgtgattgtaagatgatacactgacaataataatatgaggtaggtattactattctctgtttaaaagaaacttaaatcacttgtccaaggtcatatgcttagtgaatgctgacaccagaattcatacccagataacctgacatctggagcctgtgttgttagccactactgtattttctatgctcactgtaaaggctgttatcaaaatacatgattgacagatgatctgagttctattcaaggttgttatgagaataaaataaaataatattagtaaaactgagaagttctacacaaatgctgcttaaaattctgtgttccatgatttgcaatgtgtgattaagacatcatgcatatggaaaagactaggtgttaaggcattatcttaaatgtgcttttaatcaccactttctaaaattatcagtaaggttattctattttcatgatttaaaatgtgtaaaagagatgttgtctactgttataattacaattatcaccattcactaggactgaaaacagtctcctgagttcatgccttatcaacaaattagaagcctaggttttctgatccaaagcatgtgtgatgtttcccaaagacagcatctttggaaaagtccaatttagcccacgttaattgcctggattttccctgccattggtgagtctcaggcaacatccacagttacttacattcatgttgttcatagggtgggtagctcagccgaacagagatcaggatcaggaagataaatagaggccaggccacttccagcagcagctgacactgagtgggaaataagatagaacactgtaaatttaaaaataatatggatatccaatgccactgggatctgggaaatccacagacaacttcatttactaattaatcaacttctccagtctctcccaccactctctaagctttaacagaactgtttggagtcccaaccttttaacataccattccatatacctctgtgtcttcccttaggtaagggaagatgcttcctatcgtgctttatctggttcacttctattcattcttcaggattcatcgtggcataatttcctttactaaaatctcagcctgagctagaagccctcctcctgtgctactccagtaacccaggcacactcctcctgtagcattttcctggagctcctgaaatcatctgtttctgttgctggcttcctcagcacattgagcactctgaaagcaggcacccatctgtctgcattcccagccttagcatagtgccaggtatgtggtgactatgttgagaggagaggaccaggccaacctgctgtgctaaatacacacaacccttgctcctctaattgcacacaaagctgctccctatggggcagagaagagggctctcaaagacaatgaaaattcacacatagttccatattgacctgtgtgcactcaggactgtaaagagagagtgcaaagtccttccccatctgtccaggtctggtcatcatcttctccgatgagttaaaaagatcattgaacttctaaacaagcatgatacactggttaaaacaatgaggtttctccaaaggaaaaccctgcctcagtgagttaccaggcgataaattagcagacggacaagatggaaatcactagacacaatataattgagccagtagtgttcagacaactagttacactgcctgaagtctatcacctctcccattcctttcatttctatattccaacgttgtaatcaagataaacaccaaagagcccaaaagagtcacagggccttgtgtttcagagtaattataacttacaactgtggcttcagagtcacacagccaagataatactggtataaaatccctttttgtcttctttttttaaaaaaagcaaaagattgggctgggcacagtggctcatgcctgtaatcccagcactttgggaggccaaggccggtggatcagctgaggtcaggaattcgagaccagcctggccaacatggtgaaaccctgtctctactgaaaatacaaaaaagtagctgggcatagtggtgggtgcatggaatcccaggtacttgggaggctgaggcaagagaatcgcttgaacccaggaggcagaggttgcggtgagctgagattgtgccactgtactccagctggggcaacagagagagactccgtctcaaaaacaaacaaaaaaaaaaagcaaagatttttttttttgagacagggtcttgctccatcgtccaggcggtacgatccggagatcatagctcactggaacgtcaaactcttgggttcaagtgatcctctcccctagggctcccaaactgctgggattacaggcgtgagccactgcactgagccaaagcagaaattttttcttgatcttcaagtccttatatttttatggaaaatttgaaaataaaaaaatacagaaaagtttaaaaaggtaaatataaatcaccttaatcctacctcccagagacaatccctagtaaactgaagtaacaatggatctctgttaacatcttttgtcttttttcatgcatacataaataatattttttctctacaatattgagactatgcagcatatatacttttgtattctgttttttcatttaacatcatactgggagagcatttcccatgacataaaatataatcttaaaacatgtcctgtaatgtctacttgatattccactctatgaatagatcataattgaacctttctgctaggtgctcgtgcttcagattgttttgggtgtttttatttatttatttatttgttgttttatttctgatatttttaaaaaactgttttttatttccaaagacctttgatatggttctacattaaactcttttaaaaaatctttttggcgatggatgcagtggctcatgcctgtaatcactttgtgaggccaaggcaggcggatcacctgaggtcaggagttggagaccagcctggccaacatggtgaaaccccatctctactaaaaatacaaaattttagtgaaacgctgtgtctactaaaaatacaaaaattagatgggcatgggggtgtatgcctgtaatcccagctacttgggaggccaaggcaagagaatcacttgaacccaggaggctaaggcaggagaatcactcgaacccagaaggcctaggttgcagtgagccgagatcactgcatgatcacgccactgcatgatcagagtgagactgggcagaaggaaatacagcaagataatgacagtggatgtactaggatgataagaacgtaggtgtggctggcgcagtggctcctgcctataatcccagaactttgcgaggccaaggcaggcggatcacctgaggtcaggagtttgagaccagcctggccaacatggtgaaaccccatctctactaaaaatacaaaattagccgggcgtggtggtgcatgcctgtactcccagctacttgggaggctgaggcaggagaatcacttaaacctgggaagcggaggttgctgtgagctgagatcacgccactgcactccggcctgggcgacagagcaagactctgtctcttaaaaaaaaaaaaaaaaaaaaaaaaaaaaaagtgatgtttttaatactttcctgtcttttctaaattttccacaatgagcatgtataaattatctcatggaacaaaaaaacactgttaccataaaactatcaagaatagtttgcatagacggcacaacagaatgaaaaataaaggcaaatggatccctctctggaagaaagcatgctgacagtggagtactcaagaccaaagatggggctggtcttgctaatatttctgtaaataatcccaaagaggcaacatactcaaatttccaagcttgggaatgacattcagccttttctttttttttaatagcaaacacctttttattctgtagcttattttttaagttgagatatacatatatatcacattgcatatcttaaagatatacaatttttatttgtcaattatacctcaataaagctgggggtgggggtggggaagaaagcaattttctttctgccaaagaacaaaaccatgactctatgaaaatgaacttttctcccagctgagccaggactccctcatctcaatttccccaggtactttgtgtctgtatcagcacttggtacaccagggaccctatttatatataagcttctcccttagggtcactttcttcttactaagcctaccacatgataatggctttaaaaatgtttggtgagtaaatgagctggtttaaaagataatgaacacggaaatataaatcagttgagccctttgggaaagcaatgttaacaatacgtattcaagagtcatgtttatcccatttgcccaattactattcctggaaattcatcctaggaaactgaacttaagatatcaaaaagctatatgcataaagttattcattcattgaaacattataattgcaaaatattggaaacaacttaattgcatagcaatagggaaatgattcaattatggtacatgtactcaacaatatatcatgccatcatcagaataatgtttatgaaacacagaaatcattagccatgtaatattaagtgaaaaaagcagaatacaaaattatatgccattccaagcttgtagctgaataaaatcacttataaatattaacaaagacaggaatacaactttccttttaaatggcatgactgtaaataaatttagaaaatacttatgaggccgggcgtggtggctcacacctgtaatcccagcactttgggaggctgaggtgggttgatcatgaggtcaggagttcaagaccagcctggtcaaaagggtgaaaccccatctctactgaaaatacaaaaaaatagctgggcatggtggcgggagcctgtaatcccagctactcgggaggctgaggcaggagaactgtttgaacccaggagacagaggttggggtgagccaagatcgctccattgcactccagcctgggcaacagagtgagacttcacctcaaaaaaaagaaaagaaaatactaatgaaattaggggaaaaaaatgaagctaaacaaagagtatgagtaagataaatagccatcagccttgaagctctgaaactaccatttgtactttaaggataaatagtagctactgtttatttagggcccaatatgtacaaggcacattttatattaattacttaatttaatcctcaggacaaccctgtgagataggaaacattattgtcttgattttatatgtagcaaggctaaggctggaggaagggtaaatcacagagatagtcagtagcggggttgagatgagcagccaattctacccaactcaggaggccacatgacattctatttgacaccacgggtgactcaggtaggaaatggccccactaggtggaatggtctagaaatatcaacaggatccagagaggtaaaattaattcacagcttgtagatttataatacttacagccaatattgggcagctactgtgtactcaagacgttttgtgtatctcatctccagtatttaattcataataaccctgtgaggtaggttgtatcattaccgttttagaagtgaagaaactgaggtttgaacaagttacgagccataagaaactgcaccaatgtttgaacccagatctactgacacttaagtgtgtgcttttgtacccatcatgctgccatcacaaagctatgtttaggacatataccttttaagatatgccacttaaaagaaacctagcacttgccagccctgctgagcactgatctgacccaattaatcaaggcttatgttcctggatatctctgcagcccccatatctaggatcctgtagggcagcagatgctcaaaatatgttggttgactgaaaaaaatgaatggatcttccccatggcaactgacagcaaagggcaaacaaaaaatcttacaagccatttggagcagctgaagctggtgagtgtaagcagatcaggaaaagaggttaaaaaaaattgatgatgataataataatgaaaggtcttactatgtaccagggttgtgagtgctttatacacattaactcatttaatcatcaaacaatccaattagtactcttgttatacacattttacagaagaggaagctgagattcaaagagttaatacactgcccaatggtccaagattggcaaatggcagagccaagattcaaagccactctgactgaagggctccttctcttcgccattatggaccccaacctccttatgcactttgccttcacttaccagagcatacagacacctgctctctcaaagcccttgctgagctgggagactagcatgtatgagtgaattaaagagactgtctgcaaagttcacaccacctgagccagagaactcatgagagacaaaatttaatctttgcccttttatcttggacctctaaaattcttcccatcattgaacctagaactcaccttccaaacccaggggaatgttccaggtatttcttttcataatagcctccctctagaaaccaaagttgacttctgccaggatatgccattatggctacactcattaataaaatcagatttctcctccttctctaagcttagcacttttcctaaacataaaccctcataaatagcttggaaatgaagttgatcctttaccattataaattcctacagaaaactcttctaaatcttgctttggtgcctacccacccaaccccacacctccccatggggtgggaagatgggaagaaacattgtttttaaaaggcgtttctcaccaaagtcaaagctgctccaagagtaccgaagcaccactttgcacttcccatcttgctatttcaacatggggataatatgagcaggcactgctagagcagattttcttgatagtgaccctactgacatttggggccagataggtgttgtgagagactctcctatgaattctacgaagttcagcagcatccctgacctcaacctctaaatatcagcacatacattcccaggattgtgacaaccaaaaatatctccagatgttatgtccctggtggaagggtgagggtggggtggggtagggggataaccggccccggtcgagaaccactgctctagagttattatgagaattaaatgtatttcacatagaaggcttagcacagagtctagtacttatcatcatgttattcaatatgcatcaaaccactcttgaatcatcattcatagttatgccaacatctcccacactacagatgttcactgtccacttgattattcatgcctgacttttgctgctggctgccgaagttcatagaccacaatccagtcactctgtgaacccatttccctccctagcctgaggacacagtcacggtgctcttaaattcttgagatttagccacgttaattcaaggttagggcagcgcaagggccatgtacaaagaacagagaaaactagcagaataaaattgggccttaggcaagaggcttctgaatcatggtagccaaaataatgcactctgcgctgaaaaatgaagtcgctatttcttagtattgagagattcttgagaatataatgggggataaaaaaaggaaacaagaagaataaacatcagaaaggaagagatgaaaatatcctttctgtttctggcatggtcataaatctaagagaactcacaaagttaactaaaaagctgcaaatgatttgcaagtatgggtaagttaatcagaaccaaggtaaattctcctaaataatagcattgctattagtctctgaaaaccagttaaattaatataatgtggggaaaagagaatactatccacagtgagaatggacacataaacaaaaaaacctaggcattaacttagccaaacatgtgcttcttacataaaagaaaaccacagaactgtagtaggataaataaaggaagatgagaattaaggagagctaaactctgcttcttcatgagttcatttaatatccaaatttcccaagctaatttatagatttaacacaactgaacttaaaatagcgatagggtacttttttgagcttgataaggtaataacattcaatggggaaaaaacagataaaaatatcaaaagatattctgagaggcaaaaaggtaagtgggggacaatgagctcccccatatatcagaatgttcatcaaattcagggtacattctgggctctatcagcaccaaaactaaaactacatatcaaatgaccaaatgaataactccaaaattgctccctacacatctttttttttttttttttttttttttttttttttttttcagacagagtttcactctgttgcccaggctggagtacagtagtatggtcatagctcactgcagccttgaccacctggactcaagcaattctcctacctcagccttccaagtagctgggactccaggcaagtaccaccatgcctgactaatttccttatttttatagagatggagtcttgctatgctgcccaggctggtgttgaactcctagtctcaagcaatccccccacctcagcctcccaaagtgctgggaatacaggcatgagccaccatatccaggttttaataaatgtcccaaaaataactagaaaaggaatcactatttaatcaagtgattatttattaaataatcactgggatgacatgatatgaatgtgaagaaaaattaattttagacccatccctaacagcatacatgccaatgagacctgggaaaactaaagtgaaatcttaaggatcacatcagaaaaatgctagagaggggaaatgatttttaaaaccaggcctgccttccctgaactacaaagtctcatgcattgatggtggctatttaaattggttggatcctctggaaagacatctgatcagacacttcaagggccatttcccttcaacctagtaatcctgttcctcagattttggcctacagaaataatacaaaaataataaaagattaaatgtatagaatctttatagtaatttatttgtaacagcacacatggaacaatctaaatgttggcaacagggtttgaacttataaaaactgtgttaatggattactgcacagctatcaggaatgtcaaaggcatcatcccacagtagatttggagccaaaagatcccagccctcctcttagcaactttttattttttgagacagagtctcgctctgtcacccaggcaggagtacagtggtgcaatcttggctcactgcaacttccacctgccaggttcaagcaaattctcctgcctcaccctcccaaatagctgggattacaggcaagtgctaccacgcctggctaatttttgtatttttagtagagatgggtgtcaccacattgaccaggctggtctcaaattcctggcctcaagtgatccgcccaccttggtctcccaaagtgctggaattataggtgtgagccaccatgcccggccattaacttattaacaatactctcttcatctgtgaaacagaaattgcaacgcatacacctcagaattgctgtgagaatcaagaaagtaatggatatcaaagtattactttcaaaactataaaacacagcctacacatcagaaatcattattctaaatcagaagatgatttagaaatatgtgaacacgcacactaaataatgttaaatgaaagaagaaaacagcataaaatggtccatgtatatgtaatgattacaattgctttcttgggcctttgtcattcaagttccctctatcccaagagtcaccagacaatgtggcctgactacctcagggaatcctcttgcacataaaataaaattaaattctcagggggcactgtgggtcacgcctgtaatcccagcactttgggaagccgaggtaggaggatcacaaggtcaggagtttcagaccagcctggccaatatggtgaaaccgcatctctataaaaatacaaaaattagctgggcatggtggtgggcgtctgtaatcccagctactaggaggctgaggcaggagaatcgcttgaaaccaggaggcaaaagttgcagtgagccgagattgctccactgcactccagcctgggcgacagaactagactccgtcttgaaaaataaataaataaataaataaataaataaataaataaataaataaatattaaattaaattctccttccccaggagaattggccctaaatgatctggtcatgtctactaccaactcatcccccgccagtcttattcactccaccagtgccactggctttcttctgttccctgacctaggggacaggcacccccagtctctctgcctggaatggatttccctatctctaagcctctgatctttgcctggctaaccattgcttgaacttcagggctctcagctttaatgtgacaacctgtcaatctaaatgaaatccctacccacacctgctagtatctaacaccagtaccatagtttgccggattttttccttcataatcctcatcacagttgatagttatatttttatttgtgtgatgatatgtttcacatctgctggcctcactgaactgtaagctctacgaaagcagtactcatgcccagctgcttcaccactatatacccagctaaccataccacaagtaatagatgcttaatagatatttatccaaatgaaacaataaatgtctatttgttttaactttcttcattccgtagaagagaaaactaaagctctggagaaaggagttttcctaggccactgaggcagatggtggccaagctgggattggaatcatgaccactgctgccggcccaggagtaaggacagggaagaaatgtgtcaggtgaaactagaagtggggaaaggatgcagagagtttccatctactctgtaaaattctctaaaagctcataaatgaggagttttaatttttggatagttcattctttttcattaaagaatgcccaaatagtggtactctggctgggtgcagtggctcatgcctgtaatcccagcagattggaaggctgaggtgggtggatcacttgaggtcaggagttcaagaccagcctggccaacatgctaaaaccatgtctctactaaaaatacaaaaattagccaggcgtggtgctgtgtgcccataatcccagctacccgggaggctgaggcatgacaattgcttgatcccgggaggcagaggttgcggcgagctgagatcataccactgcactccagcctgggcaatagagtgagactcagtttaaaaaaaaaaaaatcacaattaactattttcccagccacatgactagtcagatctatttgagaaaattaataataaaggcaaaagaaaagaggccatgtggccaccctcactttgtccagtttgttccatggggaccttggcctctggatcagcctaaaaccagatgaggatcgtgaaagctctgaagttctcttccccttcctgtccccagccctgtttgtactgaatacctgccacccacacaagttaactgttactttggacccaaactgagctttgcacccaactttcacaactcaattcaatttattctttgcctaacagaaacagcggaaaactaaccctggctgatggtcccccctcagtctgcacaatgggggtacaggagaggcaggggacccaggagttaccagcaaaccaggacacagaatgaaaaggcaagcactgcctttcaacagggttgctctggggtataccattcagctccaggctgaacatagcgtttctagtcttcctggcggcagcacacaggctttatgtatgctttctattcttcctagtgcaagggagcctcctcaagacctgcaaactaatgggccttaagacatttcccactcattcagtaaatacttactaagcatgtcccaagggccaggctctgtgctgggctctgaggccaagcgtatacactccaggatctcaggagacaggaactgtgcaatgaacatccatacgctgcaggcaacagctatcatggactgctaacttcttcccctacctaatgggcagggctggttctcactatgtgagctaacaagtggccccaaaacccttaagaggttctgacgtctaaacaatataatctagaaatctaagccaggtggattggaaagtagctaccagtcagaacttgagattcagagacatagaagctttagtatacacagagagcaaagcaaaaaagggtctgcaactgtagggccaccaggagactggttctggtgctactttcctgactgaccaactctgggcacctgtgcccccctgagccccagttctgtcagctgtacaagatgcaagccagatctttccaactctaacaatctaagcatcagcaacctgaaataaatcacttttctttctgattcagcaaaatatacttcctttagaaatcaggaagagagttaaggaaaacaggttagcaggcagtggtataacaacttaagcccctttgtgtcagggtgttgcatcccacttccttctttaaaaagaactctgccacaaggctacaaactgcctttggctaaacctgcctatctctctaatcctaacacttttaaacccatctgcaataccaagcaagaagcaacaagaccagtggagtctggcccaatttgaatgacccaaccccacatcctgttgcaggattccttccctggctaagcacggaaaaccttttccctgccctttcttctaacttcaagctgctaagcagctgcaaaaaaataaaaaataaaaatagtttggaggagggaagaaaagtcactgtgatgggacagaatgaggctcggccctagtcctggggatctcagcttctggttgcagctcagttgctggctgggtgacctcaagaaatcccttccctgctttgtacctcagctttctcatccgtaaaataagaggttcagactagactaccccagagccatagcccccctttcattgccaacatgatatgattcttcccactactcactaatggacacacaacatggataaaccatggcggagacaatttcccagcaagtgggccccctctaccaggataagaaggggcaggagccctggatcacactgtagcaaaggaataagagtaaggacggacatagaggactggaacaccaagacctggggataaccacgggaggcagggagaaaggcaaggaaggagtcagaaacttcaatattctcagatggagaataggcaaaataatgacaccactgaaaagcgattaggcacattgagttagagtgccagctccaaagtcagattatctggatttgaaccctacctgtgctccttgttagtggtgtggacctcagacaagttacttaacctctctgagtagcacgttccccagctacaacatgtggaaataacagtacatcgcggggccttaaaaggaataaatctagttaataatgcctaatcagttagtgcctcacacatggaagctcattctaagtgtttgcttttattttattaatataatattatctattatactttacaattattattaaaacagataggatccacagattccagtccctgttctctcactagagacctcagaattcaggttccccatttgtaacatgagaggctgaacacaatcagtttttctcaaaggaagatctgtatacatattgctgagggattatatttaagttctctaagaggattttaaacactttgttttcatttcaacagtcatctaaacaaagtctaataaacacatatggattttttaaatgcttactttaaagccaagttctggcacaagatttcaaagcccaagtttatatttgtgtttatgattgtgttggcaccagtataattgtagcaaactcatgaggatggaacaggtgccatcaaattaaggtcatacaagtagaaaaatgggtggagaattcaatcattagcacatgataatatagactggccaaactcaaaatgatcagcatgatagcatttactgccatgcaacttataatttggtttcagttgaacaacagctgcctcaccacatttaaggtattaatttgaatggtattgattttgcaattttggctgcacttaatttgtaaatatgtatgggtcatatagttgtataataacagcctataagaagtttatacctacttttacttcctaatatttaagtaacactataataaaaaaggaaatttagtgaacaaaagggtgctttgacacttttgttcttttacagacagtgcaagcattattctagtttgaggaaaactgaatgaaattctctccaaagtcccttatagccctttgaatctcagaaagatgatcattttgattacagacatgttaagctacattaagacagccaagtggggatactggcttagaatccaggaaaaaaaaataaaggcagaacaggaacaagagacttagaaactaactacagagaaatgcatcctagagatgggatctctaaggaagggtgttcagagatagagagacaaagagctgacgtctgagtttcagggagttcactctgctctacagccctcacatccctctgtggaagagttccattcacctgcgcattaaagatgatctccagattactcaaagcattattggcccatctgggaagtgaatggcttagaaccctctgcagaaataaaacaagtctcagttattatattcctccaggcctgaaggaaagaatccagattgacaccaagatacccagtattgatctctaagagtggggccactaactcacttcacccacagcttccagaaatacaggggcccattaggggcttttggagagccaggtggctcccagggctgcagcaaaaggaaaaagtggggtgctcaggggcgattcggagccaggtcctagggatcagaactcatgcctgggcagtagcacaaaccaaagctactatttctacctggctgcaaatctgccctctatgataagccacatgccatatccggaccacacagtcctgtgtccataagagccagattccatcaatccctgtgtgaaaaccaacacagcttccttccctccctccctcctccaatccccaactcaaaaccacaaagaaaaaatgagagaaccccccgctgctgaaaaacccaagcttactgtttgtcttcttctgaaagtgaggttcttccacagcagcaacctcagctgaggccaacaagccatgttccctcagccagcacccccagcgtgtggctcgggagccctggaaggcagcggccagagctcacagcagggacgccgtggctggtcattaactgaaagataaagcaggaggggaaacagccatcagttattgctgcaaagccatacaccaatgaggactgctaatccagccctctcagctgagacctccaacacacagctctgcatcatgactgcttctcaatggatcatgagtcaccagctcccagcctctgggttcacccacaaagagggactcgggaggtgttccgacagcaggctaggagctacgtgttatggtcctaatcattttagttctatagatgttatcatctgggaatgaagaatgcatttctgaaaatagacctctctcaggtggccaaaaacactgaggatggaaatggcatactggaatcccagagacctacctctcttttctaagaaaatgcctccccttacatacaaagtcagcagcatttgtaaattttgcctcaagcctggagtgacttatactattccctgaacttccttacatactaattttcagtgggttatacaactgagtccttcaaatgataaaaagcaccatcggccaggcgtggtggctcaagcctataatcccagcactttgggaggccgaggcaggcggatcacgaggtcaagaaatcgagaccatcctagccaatacggtgaaaccccgtctctactaaaaatacaaaaattagctgggcatggtggcaggcacctgtagtcccagctacttgggaggctgaggcaggagaatcgctgaacctggcaggcggaggtgcagtgagccaagattgtgccactacactccagcatggcgacagagcgagactctgtctcaaaaaaaaaaaaaaaaagcaccatcaataaagcagtttcctaatctggaaaaccacaacgtgccttagatgagtgtgagtaaacaccaagaaaatgctaccgacacctggctctcaggtaatgaggacaaccctagcgctgtgtctctggaaagaaaacagcatcccatggagaaacaagtctgctatggcaggctcagggcatcaactgtgaaaccgacaaacaagctcccatggtcagcacatatgcacacttctggccttgttccacctgcacctgaacacaccgcccccctactccgttgggtgtcacaggtgcctccttggaggactgtttgccatgctagggcaagaaggtcttctcgtgaacaagggatactacattctgtgtatcccagccacccatccagcagttacccttatttaatgctggaatagtcccaagtagttatattaaagttaaagctggggagggggcagaagatgaaaaatggaagggaggacacacaggtgaaaattcggccctgctggcacttggtagccatgaactctcctagctgtgcttatgaaatggctcagtgaatcactgtggcctctagaggagtaggggcaagggtagggtgggacactgggcatgaggaacaaggagcagaaggaactaagaatgcagtagcgaggtatggatacaaaaccaagcgctagactagaaatctgtgagtccaaatgagatctccatgccaaggtcagtctctagtagaacaatacccttttatctaccacccaacaaggacttggattaaaacttctagaaaagtcaagagattggaggaaattgcagtgtctgagaagaaaagacagcctaccactatgtattccaattcattcattgacagtccaataaatcaagaaattctctgaaatagtcaagccttaggacctatttcttttccttaccatttgctcagcaaacttctagaaggacacaggcctccaaagtttcttactccaaaaagaggaagagttaaaccagcactgcatcagtttgttcaaagatgacaactggcagcacagcactggcaaccagagcagcattgtgagacacatgcttgtcatcccaaattgttttctaagtggctcaggacagagcttgcattccagagacactgaaataaataattagctagatttttctcatacagaagctgctctccaggaatcagttcgttgatttagaagctacatgaatctcttgaaatccccaaggtaacaatgaggaggggacaattaaaaaaggaaaactatcagaaagagcccaggcatgaattagccccggcttcccaactatgtgcccctggccaaggctttatgctctctaagcatcaatttcctcatggtaaaataaggatgacaatacttaccttgtatggtgttcaactgtgttctactgtggattcaacgagataatataaataatttcccaacacagtacatggcttaatttaagtgccaaagcaatgtgagttcccttctccccatttatctttcttcattccaacaatatcctctagctgagaaatggttatatcctgtccaaacaggacgttccattatttctagcaaatccattgtgggtttctggaaagataggaggggcaaagcagtaaggatgaaatcttaatagcctagtgttgcagtacccagagccaaacccaaatatagaatatcacctcccctaaaccctgagtggaaaagctcaaaggaagagaagacacacctctacacaacgttcatgagaagaagggaaggatgagttttcttggacagcattttcttggaagtaaagtgtctgggtttcaagaaaaaggttctgactccaaggactctccaggaagcacatggagaaggttgctaagaagtagcatagagccacagtagaaagttctaccgtggctttgctgggcacacttaggcaagcttcctcctccaattcctcccacccaccttggcactgacctggcctcctgcacaatttgctcccccatctcagaacacaatgatcaatactgggagcaattctgtcctaagaggagagtttggcaatgcccggccccttctgctcaggtaactgaagccaaagggacatttccacatcagttttccaagttagtgaacaaacaaaccaaaatcaaaaaaaaaaaaaaaaaagatataaaagagacagtactatgtactagatttctcaatgtttcaaatgcagtacactcacttctgccctcatacacatttccagttactggctggaaaggatcccacttcacagtcatcccagtcaataggccactctgatcctgctcctagatgaccgcaactgccacctcactggtctcccaaccatttgtcacagagcacccaaagttactcagctagaccaaatatctgaacatgcctctccccgacttaaaaccttttgccagctcctcagcacctgaacatagagtccagtgctcaccaaggtctacctggcctcccttctgtgactccagcctactctcttgccactccccacctgctaagcaatgccctggagatgtgtatacaggctcagaatatgctgcacgctctcctaccactgggacttcactggtgagttctcttgtcctaagacactttttcaagcactgctagcctggctaatgcctaggtctcaaacttaggtctccacttcttcaatgtcctttcctgatatcctcccctgcaactgacacgtgggttcagagcccttcctacgtgctccctaggaagacttggctgggaaagaggatttctaccttctgagtcagagcagagaccatttctgtttccttcatccctgttttccttagtatgcaaaagggtcctggcttgtcgtaagcacttggggatgtctgcttaattaattaagagacggataggagaaatagggtgtcagaattcaagggtggcagcactcctggacctgtggtaactcatttctcaagcctgattaaatgatttgggcaaattatccccaaagagggagctctgtgttcagcagcttctaccatatgcttgaaagtcacaaaggactgctgagcttcccaggtgactcctgggacatcctgaaaaacgtaatagaatctaagtctgtttcccataactgccagctttagctaaggactgggcagcctcccaaggccagcagggccatgcagtcgacttcccgcccgtcctcaccctcaagcccgaggcgtacgctctctgggtctcatcagtcacccaagtggatcactccttgccaaaatgtgacaatctccacacctcagccttgtttcatacagtttgggcatggcagaagtgactgctggaaacctttggccaattttttaaggaaattttaactgcaaatgccactgatattttgaagttattaatatctacagaatacaacagactgctaaattaaaaccttcccaaataagcagaaacactcatcattagctgcagagaaatgcaaattaaaaccacaatgagatatcattacatacccactaaattaaatattaaaagtgctagcatgtgtatggagacactgggactcaatacactgtggaattgtaaaatggaagagccactttggaaaatagtttgacagtttctgctaaggttatacagtactattatatgacccagtcatcccatcctaggtatttgtgaatatttatagaagccttatacagaatagccaaaaactggaaacaattagttgtcgaaaagaccatcaactggtgaataaataaaactggggctgggcacagtggctcatgcctgtaatcctagcactttgggagccagaggtgggcggatcacctgaggtcaagagtttgagatcagcctggccaacatggtgaaaccccatctctactaaaaatataaaaattagttgggcgtggcggtgggtgcctgtaatcccagctactcaggaggcaggagaattgcttgaacctgggaggcggaggttgcagtgagctgagatcgcgctaccgcactccagcctgggtgacagagtgagacacctcctcataaataaatatataaataaaactgggacacttactcagccataaaaaggaataagctactgttacatgcgacaacctggatgaatcccaaaagcctaatgctaagaaaaataagccagacacaaaaaactacatactgcatgattccatttatatgacattctggaaaaggtgaaatgaaggggacagaaatcactgcagtggtgaccagtggtcatgggtggaggggacgacagactgaaaaggagcatggcagtggtagatacacatgtgtatccatttgtcaaaactcatcatacttttgtaaaggggaagtcttactgtggtaaattacacatcaataaatctgaaccaaataaactgccttctattatcataattaacatacctcacaagtcataacttggaagacctaagaactggatagtgtaaagcctgattattgtgtgatcgccttggaagaggaatagtagataaatattcattaccacttataaattccacaaacaactgcagccttaactctgcaaggtgcccatgagccacaacaaatatttatcgagtgcctatcacatgccaggtgtgttccataccttagagattcagtggtgaacaacagaagcaaagttccttcattcatggggctcctattctaccagggatgggaaacagacaaataatagtgggttgttcaaacagtgggtggtggtggtaggattgacgaagaaaaataaagcagagtaaggggacagagagtaacggggtggaagttattcctttctgatgaagcatctttaggacaatgaactgagagagtggaccatatgctacccacaaaggggtggcttaaatgacagctgggattataaaattacttttacttttccctaaaccaaaacctggaataccagacagcagacagattcagtgatgctggcaaaagaaatacacacacacacacacacacacacacacacacacacacacacattcacaggaagctggctgtgaagggggaaatgatgaccctagttagcacctggcacgtgttctcccacctcttcctcaccaaaacattgtgcccttttgaacttgacatgcacatttccaggagagatgagagatgagaattataaagaagaagaaaaggggagagaggatgacactaaaaagacaagataggaggatttttccccatttggcatagccaaaagaaaaacaggaactccttcccgtgactgccctctactcttctacagcactaaatctgtctatggaaacacagtgaggaaagaaagtgcatgtatctgtacagctaccagaagctgtttgcttgtgcagtaacaaatgggctggctggtctttttccttcccgcaagaacactgccaacacatgagctttagtgctgggctcctatcgaagggtgacagtcagccctcatgcctgagccagggcaggttccagaagagggaagtctccaagcagggatcatacaagtgtcaacatctcactgggacagagaaattggcccctctgggtggaagaggagaggcttccacaaagtcatgctccatttgactgtcgtattagtagataaaatctcttggaatgttgaagactcattcccactacacccctgctgcaatcttatagacagagaagctgaggcctcccccaaagcaagtgacttgcctagcattagagctggtttctcaagaaataactttttcaacaactcttatatgccccttcccacttagctatttctcctatgattttgtttgttgttctgaatgcatttctcagagttctatccaaatagttcacatacccaaaatgtacagatagcaactaattctcctctttcaaaaacagtgattatatgacagctatttcattaaaccttaaacaaacaagagagtatgtgtgtgtgtgtatgtgcgtgtattccactttgttcaacaaacttccaaaaagttaccagaagtgagatggaagttgaaatttccaacaacagctatcaatatctctcttttttattactttattttattttttagatgtaatctcactctggtgcccaggttggagtgcagtggtgtgatctcagctcactgcaacctctgcctcccaggttcaagtgattctcctgcctcagcctccggagtagctgggattacaggtgcccaccaccaagcccagctaacttttttgtatttttaatagagacagggtttcaacatgttggccaggctggtttcaaactcttgacctcaagtgatctacctgcctcagcctcccaaagtaatgggattgcaagtgtgagctaccatgcccggcctcagtatctctcttgatgaggttgcttctagatgtctttttcgtaattgaggtataatagacaaataaaaatgttatatatttacagtgttctagatgtcttatatcaaaaacagcttgccagtaaactacaaagcaggaggtggatttaactacatcagatatgaactgaaaatacattggtgccaaagctctgattgcctattcatgagatgttgacacaaaagcaagaatcacagatatgactcatgtgcctcatctccagagagatgcacagggtcctataatattaggacatgaaacttctaagcccaacagaacatgcttgctttggaaaaggtctgttctctaattgcctctctgatcatgtgtctttggatcggtagccacgttcagggacaagcctaacaaggttactgaaggccaagacacctggaaagaacaggttcactgcacccatgattaaagacagacagatcgtggctgctgtgggggtgggaggggatattgagagtcatcctgcaatttctcccaggctgacccatcagcttaattgagcctgaagctaatctgactgcctcagtttaacttttctggcctccagatgctactgggccctctatccttaagggtatccttgctaggacagccttaaattatacctcctcacactcctgaaacattccataaaccacagttccagggaaactaccttgagttagggggccttgcagaagggtcatgggctggtactcccccctgaaactgtgttcctatttttaaaggcaacattttaatagtcaaatttgagaagccaaaaggggtaagaaatcctccaaggtaaaagtcaaggatgaaatgaagttatccaatcattccagaggaattctatcattctataagaggttctgctatcacactgtccgtttaaaaatatatagatccagtgaattttattaattccaataatctgtaacttgggtgcagtttttaaagtaccaaatgcatcacacttacttgattgttagttacaataagataataggtaactgtacttccttctttcacttgaatacacatccaatttcctagacaaaattattgctaatagctaattttcaaaataagggctatgaatttgtaaaaactgaaacaagaaatctatgaatattgtacaaatctataactagcttttgagaagcataattcttcatgttgtcaacaatataattttacaggagatcctgaccgggtgtggcggctcatgcctgtaatcctaacaccttgggaggctgaggcagcaggatcgcttgagcccaggagtttgaggctgcagtgagttatgatcatgccaccatactccaacctgggctacagtgcaagaccctgtctcaaaaataaacaaacaaataaataaggagatcctaaaggtttaactccatctatatcatgtcactgatacttggacaaccaaagatcctatttatcaccctcaacattcccgttgccaccagctaaatggtctcagggcttctaaacctcacaagagccaggatttctgaaagcagatctgtcctgtaccccaagtccttgtttcatcactatagaactacgaagaaactctaacaaaatgttagagatagcctctcttcccctgctgatttccactaagcaaacaccaagcaaccttcaaaggaagacttcagcaaacaataccactatttgccttttccctggtcggggggtatgtagcacatagaaaaaaagaatctttcctctagaaaagaaatcaacctttcaacattctatgtcatagaaaaaaaatcaatttttttcagtcacaatcataacaccagaataaaagggatctgaagggaagggattagtgaattcataaacaccctgagctacagaaacacaagcaggcaagcctctatcagcaaccctttatttgcagaaaaacttggctggataatgttccctgctgttataggacggttttccaagagaattttgggataaatggtttagtgaccatatcaccaaagatcactttgtttggattacatctctgaagaatcagtgtcttcagatgttcaaccttctcccaacctgaaggatttatatttatgaaagtgctcaaagcatttggtggggcagacaaacccaaatcttagtcactgtctttctttcttttcctttgggtctattctaccatgcagaaaactccccaaatccttaactcctttgttgtcttgagttaattgtttcagcaggaagaaaggaggttttagagtcagagaaagctgggtttgaatcctgactctgctactcaccagctctggaaccctagggactctgagcccctgtatcttctccaaaaaatagaactgataatgtatgtaaaacatttatccagttcctggaacaaagtaagtgtacagtagctattaccatgattaattctggcaatttcacagtgaagtattcatcaagggtgggacacagagtgggtggtttattaaaggaatctcttttctgtattctttgtccacagaaagggcctttccagagcaaactggagcgctctccagtacccagtgcattggtagaggtgaaagcattatacggtatcctgttgccacttctgaccattgttttactataaaaccccctcttgggggtcctcaccactcacttatactattttctctacattctcacagaggttgcacctatcctccatagcacactgccacctccctacaagtttttattttattttatttatttatctatttatttatttagatggagtctggctctgtcgcccaggctggagtgcagtggcgcgatctcggctcactgcaagctccgcctcccggcttcacgccattctcctgcctcagcctcccgagtagctgggactaccgacagccgcctgccaacacgcccggctaattttttgtatttttagtagagacggggtttcgccgtgttagccaggatggtctcgatctcctgacctcgtgatccacccgcctcagcctcccaaagtgctgggattacaggcgtgagccaccgcacccggccccctacaagtttttggcacctgactcagttttcctgtccatcccatttcctccagcctctatgtccattagaaatctctattagaaatctgagccttggccagacgcagtggctcatgcctgtaatccctgcactttgggaggctgaggcaggtgatcacctgaggtcagaagttcgagaccagcctggtcaacatgataaaaccccatctccactaaaaatacaaaaaagtagctgggcatggtagtgggtgcctgtaatctcagctactcaggaggctgagccaggaaaccatcaagtgagaccatcaagtctcacttgaacccgggaggcagaggttgcagtgagccgagatcatgccattgaattccagcctgggcaacaagagtgaaactccatcttaaaaaaaaaaaaaaagagagaaatctgagccttataattcctccatcttttcagctctacctacaatcttctctagtgtactaactcatcagtgatccctgataaattaagcaatgtgcaacaagctactgtgtctcaccatcttcctactctccactacactgaacccacaatgacgcagcgctccacaatcacatgtagaatggaagtaaaacctcagcgataagaaaagatagttaaagcagattcactacagtaacaaaccagtcaagaaatgtcactgaaagtaaaggtttgtgtgacaaaatttccagctgtgttctaagaaacataagttcaagcaggagtgcatttaatctgatttttcctcaaagcctctctaatttgtagggaagcacattcattttcattaacttcatgtgagctagagagaatctgtgattgaggctctagaacccctggtaaacatgccatcaagcaagggcaccttccccggaggttcaacctagagtataagattgtcagcactggtaaagagccttgaactctaaacccatagataggctcaagtcaggaactcagggagcctataaacacctggatacaattttgccaccttaacacttttattccctttacttgcgccaaactgagttatccaatctccaggctcttgtccagttctagttcatacagtatcggcagccttctccagaacgtcctttcaccagccagctcttgagacagtcatatgtcatgtgtgcaagacacttctatttctgcagcccggcgagggccagctaactcggttagtgacaatttaatcaaagttccagggcaagcacagagacacagagtctaagtcttgccctccaaaacttacaagcaaactccttctttagaataaccaaaacaaaccctctcgctggctgcctcactaaattaagagaagaaaggggaataagatcacaagtttaaatccacttacttgtgattctgaaaaacaaaaacttaagggtgtttttctttaaatattgactacatgaactctattatatgaggtctgagaggatcctacaaaaggatctgtattattccaatattatcaagattctgagtgttccttatagaaaaaactactgttattaagattttcacaaatcaaacattctgtgtgccaaagaacaaagtgggaaaaatggaacaaaagtgggaataattcccaaaaatggaattattgggtttcatttttggtagcctccttctgtcaactgtagttttgaaaaattcacacaatccaatcccccaagcaacaacgcgctaagtgtttacatcaggtgagagctggtgttggtcacatatgctatgaactagaattggacaatgtcccaaaacggagtgccatctggggtcagagtgccatgcccttctctgcagactccagggacatatccactctgcttaatggaagccactggaaccaagtgtcagacagccctctatttgctccacagagaagaaagccatgctctgatcatgtgaaatgtgactggaattgtaaactgaaaaatggcactaattccactaaatttgcaaatcctgcaacaagactgacaacttaataaacaatacttgaccaaaggctttctttctcgtgaactcaaggttttcactataattaacacaatcattaaagtaaaaaaaaaataaaaataaaaaccctgccttgattcacagttaattttaagcagccaacatcaacatcgggtttcaggcttttgcataaagaaacagcctttaggaaaccctcaacattcaggattttgttctgattcaaacttacaaagaacaatttttagttgagagaaacaaaaaattccagttgaaagacgccttaagattcaaattggaccaacagacaggagaaataaatgaggccagtccaatatttaacatttcagtgtccattttaagctgaaaggaacagacatctacagacacaatttcttctttctctcctataaagggcactgtaatagttatcctaaattctggtatagtatgaagaagcctggattaaagaggcaagagactaagattttaatttgcagttaatggcagctggagaataaatttagcacgccattctaccactgtgggtaatggaacagaaaacaagtccttttttttgtttcttgacacagagtttcgctctgtcacccaggctggagggcagtggcacgatctgggctcactgcaacttcagcctcctgggttcaagcaattctcctgcctccacctcccaaagtgctgtgattacaggtgtgagccaccgtgcccagccagaaaatatgtctttttgatgaagaagctgaagtggatgaccttctgagtctaagaaaactgtttgggacttgggtattcagtagccatggaatatacatcccaaagagcagaagaaaccgtaacactagaccccaacatcaaaaatatgttgctattttctcccacattgctggtaggggtgcaaactgggacactttggcaacttacattaaaatgctatgagagaacaggggaagcattccttaaaagttctaggaaaggtgttatggaggaggtagcatgagaaattcagccaagtgggaaaagcacaaacctgggagtcagagagacaagagtttgaatccctggctctgccattagccaaatatggaaccatgaacaagttatttaacttctcctcggctcaggtgcatcatctgaaatatggggctaatataataataggcaagctcagtatttccccaaatgtgggagagttacacaggatgaatttaagtgatattcagaggattttaggagatgaacaagcacagtattaaacattgaaccacatcatgagaaaatatggttcttttcagcacttcttcagcctatatataacattcttagtacattaaggagtaagcggccgggtgcggcggctcacacctgtgattctagcactttgggaggccgaggtgggtggatcacctgaggtcaggagttggagaccagcctggccaacatgacgaaaccccatctctgctaaaaatacaaaaattagccgggtgtggtggcatgcacctgtaatcccagctactagggaggctgaggcaggagaatcgcttgaacccaggaggaagaggttgcagtgagccgaggtggtgccactgcactccagcctgggcaacagagcaagactcgtctcaaaaaaaaaaaggagtaagcttttgtttagtcttctttttgacacctctttaatgcttgctaattcccttttcaacaaagtaagagaagtctcattgtcagctggggcctttgggaaccaatagtttatcttatacatagactgtgagaaaaataatttgtcttcatcctaattatttttaaaattacctttcatttatgataactcatattggttttccaattacaggtcaaatataaagttattttaaaatatattgatgattacaaaaatttgagtcaacttgagtgggctgaaatgctacctatctcagagttccagtgaaaattaaatgagatcatatataagaagaactagcccatgctgtgttccatcacccacggtctggttgatgggtaaaatttcagtaggtgaggaatatgagcagaagatcaagtgtgaaccaaggcaaatacatgagatggacatgagattccagaacaatgaggagccaaacaatgccaggaaggggttcttaaagtagaagatgaaaacctgtagagagagactcatttaacaggtaccaaaccatactatatgttaatcagtctggtgagaaaaccagctatagttccttcgagcatgtgtcttataatccaggacaaaactatcaaagtgggtcacagtcttatttcaaagagccttgaatgccaagcagaaagagatcattaatggtggcagattcttaaaagtcttttgacctctgtccagcacctagtactttccacagtacatggtgtttaacaaacatttgctgaacaaataaatttgtttaatagcactataggtgtattagtgcatttaattttcaaatataaatatgtattgttgttgttaatatcatatcttcttcttccttctctctcacagtaccagacaacagcctaaccccaactaaggtaaactctgccaccaaacatgcctgggaatggagaagggtctgcaggtcagtgtaagctcatcagtctgggccttcactttctccctgcctttccaaggaaagctgctgcttgcatcagtgttgcctttatgtcaaagtgtatcacctaaataccagatccaacagatttcaagccaccaccctccaaagacttgcttcttcaagaaaacaagcgtggtttgactcttgtgaaaaacaattactcccaacctggcatcctacaagaattttgcaaagcaagggtgaacagggatatgacaaccaaacatcttcctagcagctccttccccctccctgctcctggccagaaacctcttcttccttttactccttcttctttccacttctaatttgttatgatctctcaaacaacaaatttggtacagtgctttagaaagctttgtgtcttaccgacctacccccagtgagggtcttctgagatacttcaaactatcctcatgaggtatagtccaattctcctcctaggatgggtactagcatgctattcttgaaggatgaatgagcctgaagagttggttatggtttcctttcatcacctattggcttaacaggagtccattataagaagtaaaacttaggccgggcactgtggctcacatctgtaatcccagcactctgggaagccaaggtgggcagatcacaaggtcaggagttaaagaccagcctagccaccatagtaaaaccccgtctctattaaaaaaatacaaaaattagccggacatggtggcatacgcctgtagtcccagctactcaggaggttgaggcaggagaactgcttgaatctgggaggcggaagttgcagtgagccgagattgcgccactgcactccagcctgggcaacataacgagactccatctcaaaaaaaaaagcaaaacctacacccaaaatgatgtccgagatggagagtccaattttattttagagagattttccaaatggtgagtcagaagcaagaacagtgtctcactaaatcatgtttactcaactgaaacttattgaattaaaccaactcctccttcctttgcatttcagatgagaaccccttctggttctatgattcaaatcttcattcactcaaagcaggtaaataggaaatttcaacagcttcctctcctccctctcattcctttcttctgtcatcgatctgatcaggaatgctctgaggcattccctggttattttttctttacctctcaaaatccacatggtatgttacactaatgcccagcatgttcctcagatctctagatggctctaattaaaggaccaccccttcttctgaatacagacctggggttagaggacataagagcttgaagggctctttaaaagtcaagtagtatcattttacagaccaacaacctaaaaaacagaaaagtaaaatgacttgtccaaggtcacatggcttaatggatttgtgggcattcatgaacaccctgtaattacacataaaatttggattatatgagcccatgtgtatttcttctgaagagaaaatccgtatctttcttcaaagaagtcaacaatctcttccccaaaatatagtaaccactgacaattatatgcatatttgaaaaaaagtttaactaaaatttaatgttccaagtctgaatagtaatatgaattggtgatctagaataagagtggaacctaatttaataactgtcattgttatcatctttttttcttttcatgtctgggatatcaatgcaagtaacatgggataaagacaatttgatgtggaagtaaactataaagcaagatttttgttttgttttgttttgtttttttgagatggagtctcgctctgtgcagtggcaccatctcggctcactgcaatctctgcctcctgggttcaagcgattcttctgcctaagcctcctgagtagctgggattacaggcttgcaccaccacgcccagctaatttttgtatttttagtagagacggggtttcaccatgctggtcaggctggtctcgaactcctgacctcatgatccgcccaccttggcctcccaaagtgctggaattataggcagaagccatcgcgcccggcctaaagcaagcttttaaaatcactgaaaacactcgtatgaataaatttcactataggccaagcattatattatacggttcacattatacacaaacacaaatacctattttacagatgatgaaactgaggcaaagagtgatcagcaacttgcctaatgtcagatatccattagtaataaccagaattccaatctacattaatttgactctgatatccatgttctttttcaccaatatttgcatctatactccaagatgtcctaatactaatattctatttacttatttaggaagaactaaatcaactctctaaggtagcttcaaggaagtctttcataaatggttcaactactaaaaagttcttcctgggaaatatcataaactaaataccagctatcacaaaatatctggactttaagactaaccagataaaatgttttgacttccaaatgcttcttggaagttggatttggcagagaaaacaccggggaattttaaacaaacaccccccaagaaaagactttatagaagaatagatccaatgcatatgaagttactgttttttaaaaaagtgtttaaatctctaaattacttagtgagtcatctcactcttattaacaaaaataaattaatatacaactcaaagtacttgaatatggaatgccacagactagagcattttcttaaatcacagctgcctcagaaacggaaatgaaactgagcgaaactgaaatgtttgttctacaaaaagtaacctggcctaaataacttaagtatgcactaaaatttctcagtctaacataaacctagccttaactacagttgtttctcatataactctatttctaatgcttttctgtgattaccctgttatcttaagtagtcttttagaagacaggaagcaaacatgagcttcccattctccttgttggacttattcaagtcagcatttattaaattttttccatattaagtgggatgaattaaggccaggggagaatgaatcaaagaccttcctctagagaagcatacactcaagaggaagacaaataaatgttaactgtaattaaaaaacagaattaaatacatgatacaaagagtgctgtaatccaagtctaatggaagtaaagagaaggggatcttactttcaacttagtgatgggaaggagtggatccagaagagcttcatgaggagggaagcatttaaatcgggtcttaaaggaggtttgcaaaagctaaagggttttgtaccaactttgttttcaacatgggaaagacaggatttcaaactttattttgttttaggaaccaaatccagtgctcctccattgttggaataaatgctctttgcctgaatgctatttgtggtcttcgtagaatggagagtaactgaaggccccaccggaaatcaattttatgtaagcttttcattctctggcctcaagtatttctaaaatgtacctttctatgcaggctacttattcaggcaactattttcaggtgaagatactcaaatgaaaatagagaatcccttttggccttttgctaatatttcatttgtcaaaactttgatagtctgacaaagtctttaccatgagattggtaaactcacggaagccaaactgtctgggatgcgacttcagctccactacttacgaactccataataatgtacctagcctgcctatacctcagtttcccatctataaagacaataaaagcacctatttcactcatgagaatgaactgagttattacacggaaaacttaaaaacatatccaacataccataaatcaacagtaaatgtaactatttttaccaagaggtgtcttcaaagagtttatttctaattcattacaccaattaataagaaaggcactttctcatcctatttcacttttacaaggcagacattttttttcaagacggagtctcactctgtcgcccaggttggagtaaagtggcacgatctcgactcagtgcaacctccgcctcccaggttcaagcaattcttctacttcagcctcccaatcccagtagctgggattacaagcacccaccaccacgcccagctaatttttgtattgttagtagagacggggtttcaccatatttgccaggctggtcttgaactcctgacctcaagtgatcctcctgctttggcctcccaaagtgctgggaatacaacaatgagccagtgcacccagccaacaaggcagactttgaaactgtgtttatcttccaaaaatacgtatatcttaagaaaaaactaaatttgatttctaaacagtaacagcagtaacagagaaatagcttatttcaaaaggtccacaacttcatcaaggacaggacaagcaagaatcatattgtattataacaaatttttacaattcaccaaagttaggttttacaactaaactaacagttcacttctctttttcctttgtttcttaggcccttacagcctaatactctatcattccattttctatagatcacataggaaaacattttgagatcacacagctattcgcaaacatctgactgaagcaatagtatagttttcattatgaaccaagtaaaaaattgagttgagtaaattttattctattctttccaggatgttgcaatccctacgcaaccaaggtttcaagttaaagagaatttggctgacccactcacagcaacaaggaaaatatgatacaggctgtagattctgataaggattatagcagatgaatgtagagaatgtggtgatcatccttgaaaagctccctggttgcagcagctgaaatgttagtgctggagttaaagaactctggctgggttcaagtcttagctctgcctcttgcaaggtatatagccagagaaaaattagcttctcatttacttaatcttgtaaactagggacaataaatggttttgttgtgaaaattcaattagcatttgatgacctgcacagtggcttatgcctgtaatcccagcactttgggaggctgatgtgggaggatcacttgagcccaggagttcaagaccagtctgagcaagatagtgagaccttgtctttacaaaaaattgtaaaaatttagccaggagcagtggtgcgtgcctgtggccccagctccttaagaggctgatgtatgaggatcacgtgagcgcaggaggctgaggttgcagtgagccttgtctgtgcagctgcactccaccctgtgcaacagagcaagaccctatctcaaaataaatacaatgaataaacacgtgaaaaacatttcaaacagtacttgccacacagtgctatataagtgtctattcaacactgcaataactttggccattcatggttgtatccacatgcagatacgaagatggttgcattttttggagtaggccttctctcagcataaacaaaacaagtgttcagaatgatcttttaacatttgatgctagagtaaatgaccataacaactactataatggtattatttatttaatatctggatacttaaaaaaatgtatttgaggccaggtgtggtggctcatgcctgtaatcccagcactttgggaggctgaggctggcagatcacttgaggtcaggagcttgagaccagcctggccaacatggtgaaaccctgtccctactaaaaacacaaaaactagccgggtgtggtggcacgcacctgtaatcccagctactcaggaggttgaggcaggagaatcacctgaacctgagaggcggaagttgcagtgagccaagatcattctactgcgctccagcctaggcaaaagagcaagactccatctcagaaaaaaaaaaaaaagaaaaagtatttggttttaaaagtattttagaaatgcaaaaaccacatgcattttgatattttctagacatctagatatcttcataattagaagagtctatctaaggtaatgttcacttattctagcagctaaaaatgaaaacagtgaagaccttaatttgtagccactacatatatagcttaagtatcccggcttacgggagagaagatccctttaaaaaaaaaatttaaatggaaaaatatcccaaccaactcctctccaaaaaggtaagtactacagaagataataaaaagctaagtcactgaacttcttcagtttcattcatttttttatgtttacaatgggacttccttgagcagaaggaaccaatccttgaaaacaatcaattcctgatcactcttttccaatcctgcactaatgcactgtctcacacaaaccgaaaatatgttctaagtcaaaatgtgtccaggggtcgggcgcggtgcctcacgcctgtaatcccagcactttgggaggccgaggcgggtggatcaagaggtcaggaaatcgagaccatcctggccaacatggtgaaactctgtctctactgaaaatgcaaaaactagccaggcatggtggcgtgcgcctatagtcccagctactcaggaggctgaggcaggagaatctcttgaacccaggaggtggaggttgcagtgagccatatcgtgccactgcactccagcctgggaaacagagcgagactgcatctcaaaaaaaaaaaaaatgtgcccagggtccattataggcctgcactcgtagaaatacgagggttgagatttcaaatgctcatctgcaggggagacaacatatcacacgtgtccaggttacagtcagatatgtcattctggaacactatgcgggtgctcaaatacagactcctaaattgctctgacaacagtagcaattctagtcccttaaatggcttgtagtcatcgtgaaggctgaagacccacttccccggtccttctgattgtaaaccaatgttttcctaaaattccctagcattaattattttaatggtttgtggaattatttaatggtttgtggaagcacttgggaaacaggctgacaatggaaactttgtatttgaaaaatattgtaatatctgtagaggttctactcaggaatactttccatgcttccatactttctctgatttaggagaaagtttctcaagagaatgatactctcaacagaaacggaaagtttctcaacagaaagcctccattatttttgtggtaggtatgagaagaataggttgaaataaaaggggagatgaaaacttaaggactttaagttttgtttgaaaagaagatcataatttaagtctgggttctaaactacggccgttaaaaaaaaaagaaaaaaaaatcaagaaaattccactctttaacttgggggaaatttttgtgaggttctcttcgtgggaagcagggattcggccatggagggcaagtgacttgctgatttcagtacccagaaggtttttttaaatatgaaatttgtccactatgagatgaatgtgtatatactacccattctcttcttgaagtgtcaatgaaaagtcggattttaaaagctaatggtatcagtgctgcaaaggcaggccaattactgccagtgccagacaacttttttctttgtttatttttaatcttatttctttgcttctttttgataaaagatatacctaaagaggcacctacacataaccctggcaccgtccgccgccccaagaaccttcctgctttaccaatggcctgggagttggcaaacacgctaacaaaaaaaaaaccaaaaaaacaaaaaaaaaaaaacaaaacgggctttcgcctcaacctcatagttcctccccgtctgcaaccaccggtcttcaccggattcacagtcggaaccgcgagcaaagacacctagtagagccggccgattcctaggtcctccggccaggaggcgctgcgggccagtctccgggggccaccgcagcccgcgcgcccagcacccccaccctcacggcagagcccagcccagccccgcggcggagctccgagttctgcgccgcccgccggggttactcccggtcattccacggcaccacctcggcccagcttccccatctgcgcccaggcagaagctgccccgagagaccagcagcaacggtctggaagatggggctgcagggaacgtgggagagggaggattgggcaccccacctccgggtctccgcaggctctcctaagtcttgtttttaaaagaaacaaaactcggccgcgcgcggtggctcacgcctataatcccagcacttggggaggccgaggccggtggatcacctgaggtcgagggttcgagaccagcctggccaacaagttgaaaccccgtctctactaaaaatacaaaaattagctggatgtggtgacgcgcctgtaatcccagctactcaggaggctgaggcaggagaatcgcttgaacccgggaggcggaggttgcagtgagcggagatcgttccattgcactccagcctgggcgacagaccgagacttaaaggaaagaaaaaaaagaaaaagaaaaggaaacaaaactcgtccgcgctctgcgccagggacaccagctcagctgagcgcacggagactgtaggcaggacctccctacccctcaggtcaaacaaagacccaaggcctctagtgagcaatagcaccacggaccgtttgggacacctccaactcgagttcccggattcacagtccgggactgtgccgctccagtcccggggagcatatagccaattcccaggtcagaacagaccagcttcttaagaaccgagtgaagactcagtgctggcatttgtctccgtaggtactggccgacctgcaaccagaagggtttctagccagctcagggccctccgaacaaagcagcgctcggtgccggacctgcagctctccccacccggcagcagcgccctcagcacgcccgggaacccccgacccctctgagcccggggtactgcgcccgggtctccacgcccagagatgctccccggtctccaccgtcgggcaagccccaagcgcagcagcgcagagtcctggggtcaccagagctcgtactaggacatcgtctccccatttaacaccgcctccggtcccatctgagttgcaagtggtggggatgtggggctccggatcaaagtccccgaaaccgagcacttcccgaagcctccttggcctcgaaacaaaacaataacgcccaagtaagtcactggagagcctcttacctgttttccacttttgtgtttgcgtctctttctcctaccccttgacaagccttccggagaaggggagaaaacagaaccggggaaaaaacaaggagcaaagcgccctgagaaccggctctgttggtgcgcggagctccccgccctgccctgccgcagcccgggagagaagggtcggctcggctctgcgggtcccggccccactcactctcgctcgcaattacggggtttttgccgggactagttccttttatagattcggctgcaccgagcgcagaggttactatcggtcaaagcctgtgctctccctcctccccgccccgttcccggcctctgtttatgtagttcagtcactcagcagaaagcacgtggagccggggcccgccccttaaacgggcgacgttcagccgcccacgacacatctagggagttggggggaggtgggtggggtggggtgggggtggagggtacagcaggtgtcttagggtccgcggtctgcgtgcccttcccccgcccgggcccgccagcctaagacgcgcgggaagcgctgggctcggggctgcgccgcagactctctagtccacgttcccggcagccaagggcaccagtggaatttgcttcctctaaatcctgctttccgcaatttttttttcctttgttagtttcctcagccggagggagggattgggggagagagagctctaggctgaatctccctcaggacgccaatcattttgtcttgtcttttgtttcctttcaaaggcctaggctggggtgaggggaaggcagacagtcctctgggtaatgggctgcttttgttttccccccacaaacctggactttgatttttgataggcgacctactgccttggagattcccagcctgagctccccaggtccctcagaggacccgagaggaacatcttactgcttctcttcataaattgagaggaaggaggccacaaaaacaaaaaaagaaacaaacaaaacaaacaaacaaaaacacagaacaatatggaccagcccccttttaatttcattatattgatcagcctccctgtgataaaaacacaggacttgtatttagtttgtatacatttgtgaagtgcagccagagaattgcagtcgtgtaaaattatgtagccactccagacctccaacttctctgtttgcctttggctgtaggggagcaaaactacccaaaacactggaggggcaaaaaaaaaggcaagagtaggaatgcaggcctacacaccatgtctaaatatttaagtcatccatcaagccaacaaactaaatgtcaccttattctggccaaaactcaggtcaaactgtgaagagtctaaatatgaatctgccctgaagggcagattcatagaagactcaggacagacccgtagaagaggcccaagcaggccctggaagtgcacgtggaggccacaaggtctcctaccttgacaaagatacctttgtagccaccttgaagggcagattcacatttagactcttcacagtttgacctgagttttggccagaatgaggtggcatgagagagctgccccaagcctacttctcttcccacctccagctccatcatattccagaactcccaccacctgcatgcagacattcagctgcacaagccccctccatgctacagtcaacaggatctccaggccacggctcaagcccaggtactcacatcagtggttctatcaacactcaggacagacccatagaagaggcccaagcaggccctggaagtgcatgtggaggccaccaggcaaggaattctggagtcccaggtactcataactctgggtggcatggcccctttgcaccatggactgtttgcccttagaaagggatggatctgagctgggcgcagtggctcatgcctgtaatcccagcactttgggaggccaaggtgggcagctcacctcaggtcaggagttcgaaaccaacctggccaacatgatgaaacccagtctttactaaaaatacaaaaattagccagatgtggtggcgagcgcctgttatctcaggaggctgaggcaggagaatcgcttgaacccgggaggcagaggttacagtgagtcgagatcatgccactgcactccagcctgagtgacagagcaagactccgtgtcaagaaaaataaaaagaaagggatggatctcagaaaggccagagatgagctttctaaagcccaaggcccaggagagcggacccccttgcctcagtcaaagaataaccttggtcaataaattgggttttggggtcaaacttgacaaccacatgatgagcaatttacgtaaagtctttctgcctctgtttcatcttgtttttttcttttttcatctttttttccttccttccttccttccttcctccccccctccctcctcccctcccctcccctcatctcctctcctctcctctttctttctttctctttcatttcttttttttgagacagggtcttgctctgtctacccaggctggagtgcagtgatccaatcatggctcagtgtagacttgactccctgggctcaagcgatcctcccaccttagcctcccaagtagctgggaccacaggtgcatgccaccacacccatctaattttcgtattttttttgtagagacagggttttgccatgttatccaggctggtctcaaactctggagctcaagcgatcctctggcctcagcctcccaaagtgctgggattacaggcattagccattgtgcccggcctgtttcttcatctttaaaatggagagaagatgtatattctgtcttcctcaaaggggttttctgaaagtgaactttgttgaaacctttgagctccttggcagaatgatgttataaaagcagagagtgttattaaaaggtgttatctttcctagcatgattttagagagtaattagatctccctgaccctccatctcctctctccttcttctcctacctatttgaagtcgaccaccaaaatcattattttttttttaattgagatggagtttcaccttttgttgcccaggctggagtgcaatggtgcgatctgggctcattgcaacctccacctcccgagtagctgagattacaggcacctgccaccatgcccggctaattttttatattttttagtagagacggggtttcactatgttggccaggttggtctcaaactcctgacctcaggcgatccacctcagcctctcaaagtgctggaattataggtgtgagccactgtgcccagcccaaaatcattctttttggaattttgaagcatataattccaaaaggtatgaaggtaatcacttagattgctctaataagggaatgggaacagttaagtcctatacaaataagacaaagataagatactacaaaaaggggatgagcccaagaaaaaaatcaaagtcccagagagagaacagccattgattctaaatacacaagtctatggccccaacccaaacttgtttcactaagaacaacctgtggtttcgagaatctggtcatcccccacagtgaatacatgaacacattgtaatgtttgaaatgtttatttttcttgttgatttcttactgttagaagagctaagtgatttggcccaaagtggctaagtgattcggccagtttgtacacagggatataagtttgctgacaccaagctcatactttacaaatgtaatatcttcataaaacaaaaatactgggccgggcgcggtggctcacgcctgtaatcccagcattttgggaggccgaggcgggcggatcatgagatcaggagatcgagaccatcctggctaacagggtgaaaccccgtctctactaaaaatacaaaaaattagctgggcatggtggcaggcgcctgtagtcccagctgctcgggaggctgaggcagaagaatggtgtgaacctgagaggcagaacttgcagtgagcccagatcacaccactgcactccagcagagcaagactcaaaaatatatatatactgaatctcaaaagctagagcctaagagatgccccttgaaaaagaagcttacaagtgtgaattttcttccctccagcccttaggttggtttgtcttttagtatatttcaataagcttccccctccccatcccatccctgccccccacaccaacaccaaaaccccaagtccctcctctaggtgactccttccaaatacataggaaggccctcctttgttgctgtttttctggagaggctgattctgtaaatgtagcctgggtggcttgaggttctattctgagatgaccctggcatcttctaattacagaatcaaccttcaggcagctgtggccttgcagactctgctggaggtcatggaactacagaaaagctcaatcttatcattctattgaggcttttaaattggagattacctaaatggcattgtttggaggttgctttgatatatgttaactcatctgcataaatgtacatgtacacattgtttaaaataccaatgatactggttgctagaaactctgaaaaaatagagtaatgcaggaagtcaatgaagaataaaaaataatatattttaaaatgatgttttaagatgaatttgttatgattaagaagacctggtggggcacggtggctcatgcctataatcccagcactttgggaggccaaggcgggcagatcacttgaggttaggagtttgagaccagcttggccaacatagtgaaaacctgtctctactaaaaatacaaaaattagctgggcgtggtggtttgcacctatagtcacagctactcgggagtctgaggcaggagaatcacttgaatcagggaggtggaggttgtgatgagccgagattgtgacactgcattccagcctgggcaacccagcaagactcagtctcaaaaaaaaaaaaaaaaaaaaaaaaaaagacaaatgcctaatagctgaaatcttagagattttctggagagtgagaaatgccttaaaataaaataaataaataaataaaaaataagagggataaaaggacctgcagttcaaattgagtcagcttaattccaatacacagttagacacagaaacaaatcgagcaatcaatggtcaaataaaaatgtaccaggaaccatcattatttgtgcagtagaccgtgtattgcagaggctctcaatcaattcaatttaattggaccaatgtgatcctcttctgtattaatgtggctcctgttgacatgcaagcaagattcaaaattattattgcttctggacttgagtaagatgtttgttctgtttgtcattgggatcaagaggttagccttggctgggcactgtggctctggcctgtaatcccagcactttgggaggttgaggcgggtgatcacttgaggtcaggaatttgagaccagcctgaccaacatggtgaaactcatctctactaaaaattcaaaaaaaatttagccatgcatggtggtgcatgcctgtagttccagctacttgggaggctgaggcaagagaattgcttgaactgggaggcagaggttgcggtaagccaagatcatgccactgcactccagcctgggtgacagagcgagactccgtctcaaaaaaaaaaaaaaaaaaaagttagcctgctggattacagacaagtactgcatattccactggatttctagttgattagtgagtgataattctttttaaaaaccacccttccaaccctctttccttcaagctatccccttaagagccaaactgctggaaagatttcatctctaccccctcccttttattaacacctcacccactgcagtcaaattttcactctcacagctctgaatctattctgcccaaattcattaacgacttccttagagagagagaggccagggacgggttgggggggcaaatgtgatctctttttttctttttctttataaaatatttttaacatagaaaaataaagaaaaatatcttaagctcagaaaaaccgcttaattggtggtgctgttgacctcttttaaatccttaggctattcagtctctggtatttgacactactgaccacactttccttcctgaaactgattcctctcttttatttcatgaatctggttctcttctgattcttctgcctctttaaccactctttttctgactattgtttctttatagatctcctaatactggttttctcttttcatttctacttgctctcctcatcaatattattcacgcccttggcttcatttaagccctgtaccgccagctcttgtctccttgccaggctcacccaccgtgcgccctatgctgcctggtagaatatccagcagcatggtgtgttggagccagcacacaagctcacaagagttgtttttgcatatctctttttgtttgtttgtttgtttgcatatctctaccagctagcttgaaatcggccaacggcatgaatattacaccattggaaatccaatataaatcagtgtcgatgaaaagagtaaaactctgtaaaatatttagagatttatggtgagccaaatatgagtgatcttggccctcaggagacagccctcaggagatcctaagaacatgcacccaaggtggttggggtgcagcttggtttttagggagatatgagacttcaatcaaataagtttaagaaatacattggttcagttcaaaaaggcagggcaacttgaagtgggggcttctaggttatagatagatttaaaatttttctggttgacaattggttgagtttatctaaagacctgggatcaatagaaaggaaatgtctggcttaagataaaggactgtggagaccaaagttctcagtgtgcagaggaagccttcaggtagcaggcttcagagagaatagattgtaaatgcttcttaacagacttaaggtctgtgttgatgttaatgccagagaggcataatgaggcctgtccgacccccacttcccgtcatgacctgaaccagtctttcatgttaaattttaagagtgcccttgcagaggaggaagttcattcagatggtgaaggggggcctcagaattttatttttggtttacatcagggttttgtttggtttggtttttgtatggaaagccacttgttaacatttattaggacaaaattttgcaggtcattctacaagtaaatccaaaacaaacaaatttcttgtctttccttcaaatctccttctaccatctgcctttttaaaaattttcatttaatgatatcatcatccagacattcactatgggaaatcatagtcatccttgcttaactttttcatctgtctctatctttctcttctcatttgaaaaagcaccaaggtcaggtcaagtatacctcccaaatattttatttttttaattcatcatttatttttcattcccagtgtctaagtccaagccaaacatctgggcttctgtattgcagaacctccaaactgctgttcctgtctctagtttcttccccttcctatttgtcttccctattgcagtaaagtgattttttgcttggggaaaaaaacaaacaagcaaaccaacacaaaaacaatctaatcatatattttctccctccaaaaaaaaaatttctttttttttgagatggagtctcactctgtctcccagactggagtgcagtggcacaatctcaactcattgcaacatctgcctcccgggttccagcaagtctgctgcctcagctgcccgagtagctggagttataggcacatgccaccacatccaactaactttttgttttttcagtagagacggggtttcaccattttggccaggctggtctcgaactcctgacctcaaatgatccacctgcctctgcctgccacagtgctgggattacaggcgtgagccaccgcgcccagcccatccctcaaaatttactatggttctcctttgctcacaaaggaaaaataccctcaaagttctgtaagaagacctacaaagcctctgaaaacaagatattggaaggcctttgaagcctgatcatatgacctgcttcctcctccatcctcttccatccatccacaccccaccccttactcacccccattctaccaactcacgactctcatcatactttcccattgcttggaaatgcttcctctcatctccactcctgtcgtcctgttatgcttttattctagaagcagtaggaaagaggggcagaaaaaagaaattcacttccctcattaaatggaaagttgtgagatagagggtatatgaagaaagagagagagatttttaagtatccaaattgataggcaaatattacccccaactcagatccattatcaagtgtaacaatagattcacagaagcagtcagtacccttaaatttgccaagaaaataattggactcaggggattaaaagaaatcaagcgcttattataatagaagtagtgcatctgcgtttctttccttattcagagtacttttttgacacttaagaatccatattcctggctgtgatttctgggatgagggactgttttatttcttagccaggagcttttcttttctctgacatattaataagagagtaagtcattagaaaaaaaaaaaaatcctaggaaatgttccagatactgttttctattagacttctagagagacaatcctctttctctttcagcattttgggaacgatttcttcaggagtgcatggtttttcctttgttgccctcaatagtctgtgttgttttgacccatccttgcccagtattccttatgacttctggaattgtctggacagaagaaatacttttgccttgtcaaaggttaaatgtggagatgtgctatgaccccactgtgggagcaggccttttattttccttctgtatctccattcttctggtgactgacgtccagtgaaattagagcaatttcttagctggctacttgtcctggtgtgtaaattagtgaggaatgagctccattcatagagtcctgggcttgccacagagctgaccccaaagctggtttccccttgagtggctcaattacctaacagagttcaacaggaagcccccacatctgcctactcaccactgggattggaagccctggacacactgcctgaatgagaacagaaagctaagttgggggtgcagtcttaaggtatctaaggaaaatagaataggaggttggggaaaagagggaaaataatgtaatcatactcataaaaactgagggtgttagtagggtgcaaagaggcccaacattctgatagtttagcaaaatgtatcaagaggctttggtccaggaccagtggctcatgcctgtaatcccagcactttgggaggccgaggcatgcagatcacctgaggtcaggagtttgagaccagcctgaccaacatggagaaaccctgtctctactaaaactacaaaattagccaggcatggtagtgcatgcctgtaatcccagctactcaggaggctgaggcaggagaattgcttgaacctgggaggaggaggttgtggtgaaccgagatcacaccattgcactccagcctgggcaacgagagcgaaactccgcctcaaaaaaaaaaagcctttggcccactaattttacttggaggaatttatactaaggaaatatccgatagtatggtaaaaaaaacttatgttcaagaatgttgtcactattttattgatgagtgaacattttaaaaatacttaatcatctgataacaattctaaaatacacattgataaattcacatgatagaatgttatatagccatgaaaggtgaaaataatgttttcaaagagttgtgatataggaaactgctcatggtaaatgcgaattgaaaaaaaaagcaaagctatatttatgtgtatggttaacattcaataaaaaataactgttactatattgataacctttttcattgaatatatgtgcctagaaaagactgcaaaaaaaaaaaaaaagaaaaagaaaaaagaaaaaaaaaatcccagataggtgctaacagcaatcacctgtggatggtaagattataggtaattttttcatatatgtctgtattttacaaaatttataaaataaacacatgctatatatatgtatacacacacacacacacacacacacacacacacgtaaatatttatatatatatatatatatatactttattttttgagacagggtctcactctgttgcccaggttggaatgcagtggcccca

SEQ ID NO: 92 - DNA, 111661 bp, Homo sapiens
  misc_feature (1)...(111661): n = A,T,C or G
tgcatgactcttaaaccataatttctaatcttgtggctaatgttagtcctaaaaaggcaatctagtccccaggcaagaaggaggtctgctttgggaaagggctgttattgtctttgtttgtttgtttgtttgttgtttttgagatggagtcttcgctctgttgcccaggctggagtgcagtggcgggatctcagctcactgcaacctccacctcccaggttcaagcaattgtcctgtgtcagcctcccgagtagctgggactacaggtgcccgccaccacacccagctaatttttgtatttttagtagagacagggtttcaccatattggtcaggctggtctcgaactcctaacctcaggtgatccaccagcctcagcctcccaaagtgctgggattacaggcgtaagctacctcacccagccaccactgcacccgacttatnnnnnnnnnnnnnnnnnnnnnnnnnnnnnnnnnnnnnnnnnnnnnnnnnnnnnnnnnnnnnnnnnnnnnnnnnnnnnnnnnnnnnaaaatcttacacatggagagttctttaaagacgtaagttaaggccaggtgcggtggctcacgcctgtaatcccagcactttgggaggctgaggtgggcagatcacctgaggtcaggagttcgagaccagcctggcccacatggcaaaaccccatccctaattttgtaaaaatacaaaaattagccagacatggtggtgcacacctgtaatcccagctactcgggaggctgaggcaggagaatagcttgaacccgggaggtggagtttgcagtgagccgagatcatgccattgcactccagcctgggcgacagaacaagactctgtctcagaaaaaaaaaaaaaaaaaaaaaaaaaaagacctcagttaattactggctttagagtggagccttttaaggaacagggccaggaaagtatgcagtttctagggactaataagcaggcttggatccccaaataaagggaatcaggctatcccttataggagtcttatctctcagtgggggtgggtgggtatgtttccataccttctaggtggtcaagagcatgcttctctgatccaaacatgcaaagaactgagtactcccctataactgccattagccatcccttgaagtatatttcctacctagttattacacattaaggctaaaagctctctcataatgtaatctctcataccctaaatgtaaaaaacatcaggtaacacaatgcaaaacagagcagagcctgacttttaaccaaatctcttattaccactctagccaggacaaatagctgatattcctggcttttggacttgaccaaaggtaaccttccaggtgaaacgaataagacttaactaggattatgacttaaccatggatgtgcatttttttgttttttttttttgtttgtttgttttgtttttttttgagatggagtcttggtctgttgcccaggcgagagtgcagtggcacgcacaatctcagctcactgcaacctctgtctcctaggctcaagctatcctcttacgtcagcccccctagtagctgggattacaggcatgcgcaaccacgcccagcgaatttttgtatttttagtagagatggggtttcttcatgttggccaggctggtctcaaacttctgacctcaggggatccacccgcctcggcctctttttaaagtgctgggattacaggtgtgagccactgtgtccggcatgtgtggtattttcaaagagtgcagtggcacgcacgatctcagctcactgcaacctctgtctcccaggctcaagctatcctcttacatcagccccccagtagctgggattacaggcacgtgccaccatgcccagctaatttttgtatttttagtagagacagggttttcgtcatgttggccaggctggtctcaaacttctgaccttagggatccacctgcctcggcctccttttaaagtgctgggattacaggcatgagccactgtgcctggtgtgtgtggtattttcaaagaggtggtaagcagttgttacaagatctagaatcgccaaatgtagcccagagaaaggaaaattcaagatgggaagtcagaagttgttcatggtagggaagataattaataactggcaaaagtcacacagacagcaaaccagaaagcacttattccctaagccgggaattgaaccgaggccaccactgtgaaaaaaaagataaggccttagccacttagctagggtgccgggcaatttctagtactcttcccagaaggagcctaaagcagtcaatttcgagcttgcaaaggcttttagctgctcaagttaatttttagagctaaatatgatatgaacctccaaaattcccacccttcagatggcagaagccaagagaaagtaccctgacatggtcacagggttaaaggatcaagctcccgcctcacctccccgagtagctgggattacgggtgcttgccaccatgcccggctgatttttttttttttttttaattttagtagagatgaggtcttgctatatttcccaggctggtcttgaactcctgagctcaagcgatcctcccacatcagcctcccaaaatgctgggattacaggggtacaccaccatgcccagctgaaattacccttttaaaccaaagccaataaggatctgggtaggcccttagctgccagcagaagtgacctatcctaagagatgatttgtcaagattttgttagtggagagaagacgattccagaaaatctgggtgtttaccacaggctgagcacaaggaaggaaggaaggctttgggtttccttgtagggacaggggacaagtaagggctctggtgactctgtcttgctgtcttgtatccggaatggcctgggctgccgcctgggagaatgctgcactccctaggtcccaaagtgatgccagtggacctccagacccccttcagggaagggggtgctgaggattctgggaagactacatcagctgacctgagtgaacttgtttcttgtttgtttgttttgcttgtttgcttgtttgtttgagacagggtcttgctctgtagcccaggctggagtgcagtggtgtgatcttggctcactgtaacctccatctcccaggctgaggtgatcctcccacctcagcctcctgagtagatgagcctacaggtgcgcaccaccacacctggctaattttttgtatttattgtagagtcaaggtgtcactgtattgctcaggctggtcttgaattcctgggctcacgtgatccttccacactagcctcccaaagtgctgggattacaggagtgagccactgcgcctggcctcaactttttaaatttaatttcaagtgactcaaaagaaaaacaagcgaaaataaaaataaagtgttaaggcataaacagttaatgggcagtcagtttcctccctagagcttttgaaattacagacacttgacaatgacgccatctagtggaaggttagcaggtcagacgaaacccatctatttctcctgattcttgctctgtcagtccacagctctgaataagtgagttttgctggccatcccaggagtggactagccccaattgtggggcatcagcacccaggaacaacatcctatgaatggtctttcctgcttctctgagtttgctgggctctcctctggtctttcaagttccaaagagaagaatctagcacttactgagtacctcctggttaaagatcagttcattagatgggccagctgactccattctcataatgaccctgtgacgtgttctgtttcacacatgaaaaaacccagcctggtcaacatggcaagtcctcatctctacaaataatttaaaaactagtcagatatggtggggcatgcctgtggtcccagctactggggaggctgaggcaggaggagtgcttgagccccggagctcaaggctgtagtgaggcgtggtcacaccactgcactgcagcctgggcaacagaacaagaccctgtcaaaaataaataaataaataaaaaggaaactgtaactataaaggtagtctgtctctttgtaggaaggctgaaaatacttgtttgtacatagtgctagaagagccttactgttggaatttacagagggagaagctgagatatttgctcaaagttgcttgctactcaatgggaatggtgtttgggctgaaacgcaagttttttgggggcaaaaaacttgcggtgagcactgtagcctcgacctccatggctcaggtgatcctcctgcctcagcctccccagtagctgggactaaaggcatacttcatcatcacacctggctaattttttttatttgtggagacgaggtcttgccgtgttgcccaggctggtctcctgaactcaagcgatcctccctccttggcctcccagagtgctgggattccaggcatgagacaccatgcctggcctactttatatattttcaatgtactatttctgcattacatattttatgtactttttaatatcaatagtatgtctgtattagaaataacaatgtaaaagtgaaataagcactgggagcgtccaaagctattttaaaggtgttgggggtggccaggtgcagtggctctcgcctgtaatcccagcaccttgggaagctgaggcgggtggatcgacttgaggccaggagtttgagaccagcttgggcaacatggtaaaaccccgtctctactaaaaatacaaaaagttagctaggcatggtggtgcacccctgtaatcccaggtacttgggaggctgaggcacgagaatcacttgaacccacgaggtggaggttgctctgtctcaaaaaaaaaagaaaaaagcgtttaggagaagctgcggctgataaattacaaatagatgggttttcgtctgacctgctaatcttccactagatggcgtcattgtcaagtgtctgtaatttcaaaagcgctagggaggaaagactgcccattaattgtttatgccttaacactttatttttattttcgcttgtttttcttttgagtcacttgaaattaaagaaaaaaaagctgaggccaggcacagcggctcactcctgtaatcccagcactttgggaggccagtgaggaaggatcgcgtgagcccaggaattcaagactagcctgagcaatatagtgagacctcgtctctgcaagaaatacaaaaaattagccaggtgtggtggcgcacacctgtagtctcatctactcaggaggctgaggtgggaggattacctgagcctgggagatgaaggttacagtgagtacagtgagccgagatcacaccactgcactccagcctgggctacagagcaagactctgtctcaaacaaacaaacaaacaaaacaaacagacaagaaacaagttgaagttcccttcagaaataccctcctgcttcaagcctatagagggtaaaccaaatgaggtgctcgttaaaagaatttagtccttacatgaaaaataccatcaaatgtatgtagagtttcttttagtcctgcagaaatgcatacctgataccttgattatcacagagaaaaatgtttttggctactttaaaatgttccataattctgagcaggctggcagtcctaccttttcaccatcaaaaaccccccattatttttattatgtatttatttattttatgttttgaggcagggtctcgctctgttgcccaggctggagtgcagtggcacaaccatggctcactacagccttgaactccagggcctcatcctcccaactcagcctccctaatagctgggactacaggcatgcaccaccaagcccagctaattgttttgttttgttttgttttgttgtttgtttgttttagtgatggagtctcactatgctgcccaggccagtctcaaactcctggactcatgtgatcctcctgcctctgcctcccaaagtgttgtgattataggcatgagccaacactcctggccccttcattatttgtattttataaatctcattattgggaatattttatccaaaatagcattaactaagtagtcaatgatttttctatttgtatttatatgtatatttgattaattaaagtccccagtagataagggacaaccttgctaaattgataaaactccatccctgccgggcgcagtgactaattcctgtaatcccagcactttgggaggccaaggcgggtggatcacttgaggtcaggagttcgagaccatcctggccaacatggtaaaaccccatctctactaaaaatacaaaagtaagctgggcatggtggcaggtgcctgtaatcccagctactcagcaggctgaggaagaaaattgcttgaacccaggaggtggaggttgcagtgagctgagatcacaccactgcactccagcctgggtgacagagcaagactctgtctgtctcaaaaaaaagagagagagagagagagaatgcatctccttccttcttgaaatgcccagattgccgtggtcatatcattgatgagctaagtaatgggattcttgggcttataagtttacagtggctgaagcctccactgtatggggcagtttttgtgaaatcctctagtaccggaatggcaccatggaagtggaaggaatagagtggaatgtcattgagtcttcctcattcaaaaaaaagagcccctttgcagatatagctgtccatatccatgggttccagattcatggattcaaccaaccgtggatagaaaatattcagaaaaaaattccacagtttcaaaagttgaaacttgaattttccacgtgctgagtactatgttgaatcccccacaaacgaaatgatgtgcagcatcttatgtggttttataagtaatctatagatgatttttttttttacttctccttatggagcagagctaactcataggcagtacacctagagttggccataagtaatctagagattattttaaatatacagaagggtgtacctaggttatatgctaatactatgccattttacagaaaagacttgagcatcctgagattttggtatctgtgggggtctggtacaatcccccatggatatcgagggacaacagtattcacaaagaaaaaagtttaattacaccaacagcacatgtaattaagtctccaagactccatctccgatgaggtgaatttaaagaatgcgttattatgattttggtagttggtcagaatttcgtatctggatagctgagagccagacctactagcaagtagctttgtgttgaccatggacaagtggaactgtgnnnnnnnnnnnnnnnnnnnnnnnnnnnnnnnnnnnnnnnnnnnnnnnnnnnnnnnnnnnnnnnnnnnnnnnnnnnnnnnnnnnnnnnnnnnnnnnnnnnnnnnnnnnnnnnnnnnnnnnnnnnnnnnnnnnnnnnnnnnnnnnnnnnnnnnnnnnnnnnnnnnnnnnnnnnnnnnnnnnnnnnnnnnnnnnnnnnnnnnnnnnnnnnnnnnnnnnnnnnnnnnnnnnnnnnnnnnnnnnnnnnnnnnnnnnnnnnnnnnnnnnnnnnnnnnnnnnnnnnnnnnnnnnnnnnnnnnnnnnnnnnnnnnnnnnnnnnnnnnnnnnnnnnnnnnnnnnnnnnnnnnnnnnnnnnnnnnnnnnnnnnnnnnnnnnnnnnnnnnnnnnnnnnnnnnnnnnnnnnnnnnnnnnnnnnnnnnnnnnnnnnnnnnnnnnnnnnnnnnnnnnnnnnnnnnnnnnnnnnnnnnnnnnnnnnnnnnnnnnnnnnnnnnnnnnnnnnnnnnnnnnnnnnnnnnnnnnnnnnnnnnnnnnnnnnnnnnnnnnnnnnnnnnnnnnnnnnnnnnnnnnnnnnnnnnnnnnnnnnnnnnnnnnnnnnnnnnnnnnnnnnnnnnnnnnnnnnnnnnnnnnnnnnnnnnnnnnnnnnnnnnnnnnnnnnnnnnnnnnnnnnnnnnnnnnnnnnnnnnnnnnnnnnnnnnnnnnnnnnnnnnnnnnnnnnnnnnnnnnnnnnnnnnnnnnnnnnnnnnnntatttcctattggccgggcgcagtggctcacgcctgtaatcccagcactttgggaggccaaggcgggtggatcatctgaggttgggagttcaagaccagcctgtccaacatggagaaacactgtccctactaaaaatacaaaatgagccgggcatggtggcccatgcctgtaattccagctactcgcggaggctgaggcaggagaatcacttgaacctgggaggcggaggttgcagcgagtggagatcgcaccattgcactccagcctgggcaacaagagcgaaattccatctcaaaaaaaaaaaaacgtatttcctaccttggtggcttctatgggttcctgggaaggtgggatggtttttgcagttgtattttgctagaggtgacagtggggaggaagtgcatggagggtaaagctgggggtttttttgtttgtttgtttttgttttctttgagatggagttttgctcttgctacccaggctggagtgcagtggtgtgatgttagctcactgcaacctctacctcccgggttcaagcaattctcctgcctcagcctccctagtagctgggattacaggcacctgccaccaggcccggctaannnnnnnnnnnnnnnnnnnnnnnnnnnnnnnnnnnnnnnnnnnnnnnnnnnnnnnnnnnnnnnnnnnnnnnnnnnnnnnnnnnnnnnnnnnnnnnnnnnnnnnnnnnnnnnnnnnnnnnnnnnnnnnnnnnnnnnnnnnnnnnctaccataaaactcacccattataagtgtacaattaattcagggtctcttagttaggcttgcacataaaatacaggatatccagttaaatgtgaattccaggctgggcacagtggctcacacctgtaatcccagcactttgggaggcctaggcaggcagatcagttgaggtcaggagttcgagaccagcctggccaaagtggtgaaacccccgcccctactaaacatacaaaaattagctgggtttgtgttgcgtacctgtaattccaactacttgggagactgaggcaggacaatcgcttgaaccagggaggcggaagctgcagtgagctgagatcgcgcacctgtaattccaactacttgggagannnnnnnnnnnnnnnnnnnnnnnnnnnnnnnnnnnnnnnnnnnnnnnnnnnnnnnnnnnnnnnnnnnnnnnnnnnnnnnnnnnnnnnnnnnnnnnnnnnnnnnnnnnnnnnnnnnnnnnnnnnnnnnnnnnnnnnnnnnnnnnnnnnnnnnnnnnnnnnnnnnnnnnnnnnnnnnnnnnnnnnnnnnnnnnnnnnnnnnnnnnnnnnnnnnnnnnnnnnnnnnnnnnnnnnnnnnnnnnnnnnnnnnnnnnnnnnnnnnnnnnnnnnnnnnnnnnnnnnnnnnnnnnnnnnnnnnnnnnnnnnnnnnnnnnnnnnnnnnnnnnnnnnnnnnnnnnnnnnnnnnnnnnnnnnnnnnnnnnnnnnnnnnnnnnnnnnnnnnnnctggtctcgaactcccaacctcaggtgatccacctgcctcagcctcccgaagtgctgggattacaggcgtgagccactgcgcccagcccagcaaatactttcttagtgtaagtatatcccatgcaatatgcaaggatgtcccatctgagacatacttatattaaaaatagtatttattgcttatctgaaatttaaatgggcatcctgtatctttattgacgaaattcgggaaccctacaatttgtgaagacagagttgtacaagcatcaccacgatccagttgagcacattttcttcacccccaaaagttccctcttgcccaatggcagtcgtcctccgatccctctccaagtcccaggcaacctctggtcggcatcctgtctctatagatttggagaagactgtatttttaagtggagagacttggctgttacataactgtttagcacccgagtatttgcatgaagagtttcatttcattttttcaagtggaaccatggaggagagtggctgcccaaggtggggtttgtcttttgctgtctgagtggcccctgggatgcaggtatgtccattatttaaatctcttggtgtttacagaccacatgggtaacccctgttgtggcaaggctgagggcctcttcacctgtcactgagtgtggggactcttttcaggcctgggcagggcaggaagtctggaggggatatcaggtgatcagagggccattcgagaatgctgcaggctacagtgacaaaatgctggtcctgggctatctgagaccagtcctggaatgacttaactaaattaaatcttatgaatcaaggtgcctagcaccgtgcctgttgcctaaagtgtagctggaaaatagtctcccacgaatccagagtgacatttgctccatacccagttgggcctaagcctctagatctagagatatccatgaagaatggctcttgctttaagaacttaattctttagtgactaatgtttctagagcattaaccgcaggcaagcattttctaagagctttacatatgttaatgtccaatcctcacagacacactgtgaggcagatgctcgcattctctccatcttgcctatgaagaaatcaaggctcagagaagttaagcaaatcccctgaggtcacacagctagtctgggcctagaagagccttttctcctactattactctgtgttgcttcataatatggtgtaagttctgtgggagcccagaaagcaaggcatctgagctactgggaaggagggatgagacaagtaccctgaggagttagctgaccaaggaagcagggaacagcatttcaagcagaaggaacagcacatgcaagggttacaggcaagagaccgtggcctgcataaagagtggctgatgacgtttgggataaacgacttcccagaacatttcaaaaaaactcaaatgttttctttggggaaaatagtctgattttggcaagagaaagaatctcagaagagagccttgagaccttcaggagctattgttaacttggtgaattgtctctggtgcatctctctccctcacaaggcctgtttgttcttctgtgataaaagggctaatagcacctgtgctgtgggctcatttaatagaacacagtcgtgtgtagggcgtaatagaagagaatggaatggaataatgtaggtggcatgcatcgagagcttcgcatgtggtggccacccaggtgtggcacagccctgggccccgacgcatccgctcgggcacccatgccttactgacacattgaagaggagctgggaatttgttttccatctggcagagccccttccgtcttcctctacctgcggttctgggggctcagtctggagaggcgccaggcggctaactgactctggcattgggaatgcgtttgcagggagccaggggaagggagaagtcttactgccggctccctccaggctcccttcctcgtgatttatcactatggaaactgagctcctttcctcttcgcgctgccggctggtgggggtgcacattgttgatgccgttgccccacagatcagaagttccttcctctttcctgctgcagaaatgccacagtaacctacgtggcccaagaactgcagctcacacctgaagagcccagtcttgggaaaaacaatctcatcggattccccaggggttacgggggccttctgggtaagcagagccggcctgagaacaatgtcaggggagaacaatgcagccagcgggctgagctggtggccctgctgttcctcttccttcagcttccctagttgggggttaaaaatggatttacaggcagtcgcaagtatatcatgttaggcggcagaaaactgaaactcagagtctcttagtgtgggcaaagtctcccgcgacaacccacttgctgcaggtgcccagccctgcatatgcccacccatgacatatgcccacccactgcatttgcccactcactgcatatgcctacccatcacatatgcccacccactgcatatgcccacccactgcatatgcccacccactgcgtatgcccaccccctgcacatgcccacccactgcacatgcccacccactgtgtatgcccacccactgcgtatgcccacccactgcacatgcccatccactgcacatgcccatccactgcgtatgcccacccacagcatatgcccacccactgcacatgcccacccactgcacatgcccacccactgcatatgcccacccactgcacatgcccatccactgcatgtgcccactcactgcatatgcccactcatgacatatgcctgtccatttcatgtgcccacccatgacatatgcccacccatgacattcccacctagtgcgtgtgcctatccactgcatatacccaacccctgcatatgcccacccattgcatatgcttgcccattacacatgcctatccactgcatatacccatccactgcatatgcccacccaccgcatatacccactcactgcatatgcccatccactacatatacccactcactacatatacccactcactacgtatacccactcactacatatgcccacccactgcatatgtcctcccatcacatatgctcacccactgcacaggcctggtgagagctggctctgctggacttggtctggccctccgtaaccattccttagaggccagtgcctggattacagcaccctgggcatggcatcacatgtacctgtgccaggtcctagactcaaggacacagggcaaggggggattccagagacaacaaaggaagctccctggccaggaagtcctgagacactgccaggcccagcagtccccttgctggccacacagacaagacatggccaacctcagggcctcagggtccttctctgtaagttgacctaagggattcctctgtagcctcatcctatgggggatgggagagagggagctaagagcacctcctacttgcccatctctctcttaagagaggttcatctaagagtagctttctggggaaactggccttcaaacgacctgggagaaaaacatttcatttaggagctgaggcttgtcaatgcatctcacaatgatttgcagaaatcccctttacctccctgaatatacaagatcttttctaggtgcaaaatgttcctgtttgttttccgtttagaatttccccttattgggagcatattttctccctctcaccctcagagaaaatttccaggttccttccacattctaaagagcaatgtgaaaattcaaggttttctgttttgttttgttttgttttttttgagactaaatctcggtctattgcccaggctggagtgcagtggtgcaatctcagctcactgcgacctccacctcccgggttcaagcgaattctcctgcctcagcctcctgagtagctgggcccacggcacgtgccaccacacctggctaatttttgtgtttttagtagagacagggtttcaccatgttggcaaggctggtctccaactcctgacctcaagtgatcctcctgcctcagcctccaaaagtgctgggattacaggtgtgagccatggcatccagccctattttttaaatagaaatatttttattgagataatagtacatttgcatgcatttgcagtaaataatacagagatatgtgccagtttcccctaatggtaacattttgcaaagctacagtacaccatcacaaccaagttttctgggttttgtttatttgtttgttttgtttttgagacagggtctcgctctgttgctcaggatggagtgccatggcccaatcatggctcacagtagcctccacctcccgactcaagcaatcctcccacctcagcctcccgagtagctgggaccacaagcatgtacccccatgcctggctaattaaaaaacaaaattcatgtagagatggggtgtctcactatgttgtccaggggggtctcgaactcctgggctcaagtgatcctcccgcctcagcttcccaaaatgctgggattacagtcaccagccatagcgctggctgcaactggtccatttttaaaaagctctaattaaagcacgtccttgacatttgggaggtattcatccacaagcccagatgtgttctcacattctgagtattaggaatgtttacacaggctcctgacgtggtcctaaatcacatgaatctcatttctgtctagaagcaccatttcctgtgcatattctcataccccaacttggctgcctttttgatttttacgtatctatttatttcaattgtgtttaatcaggtaatgaagctctaaagaaacaggaaacatggagacagtggtatagaacaaggtgaaggattacatccttgcataaccttggtgaatacatatgttacattcagtgtatttcaactgtttcagactttgatcccttccatctttgttctagaccaaagatttttctattgtggagtatttcaagaagtcctgaaatgtttttctttctgttttgtgtttttttttttttttgagacagagtctcactctgtcacccaggcttgtgtgcgatggcgtgatctcggctcacctctgcctcccgggttcaagcaattctcctgcttcagcctcccgagtagctgggattacaggcgtgcaccactatgctcagctaattttttgtatttttagtagagatggggtttcatcatgttagccaggctagtctcaaactcctgacctcagacgatccacctgccttggcctctcaaagtgctgggattacaggtgtgagccaccgcaccgggccctgaaatgtttttcttccagaggccctgtgtgaggaattagggctcagggctgaaggcaggcagccagcatcaccacttcagctgtgggatcgtggacaagagtactaacctctctgagagtcttgtttctctcttgtaaaaagagggtaataacagtaactgactcataggattaaaggaaacgtgagaaatatgtaagcactcaataaatattagttattattatttaaataaaagctccatagcggagtcttataatttttaggagtaaaatcataactctcatgcaaatataatatgaacatgtgtcaaatattttatttaacttatcaattaatgagtgaaccagtgaaatgctataacttactcaaaggagaatcaaagaggatatgtatatatgattagattgattgaccaattgatcattagatatgcagatatctaccatcagggatgctaaaatgagttggcttaaaagatgtaaaactggttgggtgcggtggctcacggctataatcccagcactttgggaggctgaggcgggtggatcacctgaggtcgggagtttgagaccagcctgaccaacatgaagaaaccccgtctctaccaaaacatacaaaattagctgggcgtggtggtgcatgcctgtactcccagctactcgggaggctgaggcatgagaatcacttgaacccaggaggcggaggttgcagtgagccgagattgtgccattgcactccagcctggacaagagcgaaactccgcctcaaaacaaaagatgcaaaattgctcaatatcattaggggaattatcaactgcatcatccccactggtcacaacttgcatttctctggacaacctggaaaattataagatatctcaaagacaatgaaaggcacagaaacctcatagagtcagataagctggaagaatgtgctagattgcctctactttttgttgaagacacccaggaatgttttaggcctatttcaaaccctttcacaatttttcctgatgcttgttcatttgatatgaggtcaaaggacaatacttaacgtgacccatatccctatagagttttatgatattgaggcccgcagtggccttatgaggagcaatctacaggctggtgagctgaggcttggtagacttggctcacatgagttcagaagtccacaaacctcccccagggcagctcatcctccctttcttttttcttttcttttctttttttttttttgagatggagtctcgctctgtcacccaggctggagtgcagtggtgtgatcttggctcactgcaacctctgcctcctgggttcaagtgattctcctgcctcagcctccctagtagctgggattacaggtgcctgccaccatgcctggctaatttttgtaattttagtagagatggtgtttcatcatgttggaccaagctggtctcgaactcctgacctcaggtgatcctcccgcctcgtcctcccaaagtgctgggattacaggcgtgagccaccacaccccgccagctcctgctccctttcatggtgggtggtgcaaagcaggattgctcttggcccctcaaggccaaactaatgaaactgtgctacgtgcaactgatgcagggcaggtgaactccagaattggggcttagcctggcagggttcttggctttgcccaggaaagaattcaagggcaagctaggggagccggtggtgttagacagcaacttttattgaagcggcagtgcacagcagcagcagacagactgctccttgtggagcagggctaccctataggcagtgtgcccagagcaccagctcagggcagttctgcatcatatgtgtgcccatctagttatatgcaaattaagggccagactatacagaaatttctagaaaaagggtggtaacttctgggttgtcaggtcattgccatggaaaggggtggtaacttccggtgttgtcatggtaacggtaaactgacacggcacactggtgggcgtgtcttatggaaagctgctttctctcagtccctgtttagctagtcttcaatttggtccagtgtccaagccctacctttggagttgagttccgccgcctacctcagaacatttgtagagccatttaaaaaggaaaactctctaatgtgaccctttgtagatccactttatgtctgataaggaaaggttggaattctttctgctgtgtaggcacaggttcagggccacacagcccttcccttctttgaacaccggattagtgcatcagggagccccggcgtggtggattcaggctcaaacactggaaacagtccagcaaaaccttgacctatagagagtgaagggcacagggccaggggaggggagctctttgcggacacagagtgacttctttctctaacctgccttttgggtttccttggcttttccttcctcctcctctcggatgaacttgtgagaatgaaggtgcatgtctgtggcccatgctgggtcctccaggcatggtgggctctgggagggccatggctgaggagcccaaggaagccaggcccgttgctttctcacctgaggattcgtctcagaaccatgacacagtcaaatgagaacagaaaccccactctaaggccgggggcagtggctcaggcctgtaatcccagcacttttttgggaggccaaggtgggtggatcacttgaggtcaggagttcgannnnnnnnnnnnnnnnnnnnnnnnnnnnnnnnnnnnnnnnnnnnnnnnnnnnnnnnnnnnnnnnnnnnnnnnnnnnnnnnnnnnnnnnnnnnnnnnnnnnnnnnnnnnnnnatctcaaaaaaaaaaaaaaaaagaaaaaagaaaagaaagaaatcccacttcaaatctctactagaggttgcttgaaggttgctggaagggagatgtgagagcagacttacaccactctgcacagagaaaaacccatgaaaaacttgtgtctccctcagagtcatggtagtggccccagcgtccctgacacccctcccaaagtcaaccagtcagtctctccctgtttccctcacccccagatcagctcctttctgcctcatcctgggccttcatccttctgttgtccccagacgaccccaccgcccctggggatagactaggctgcattttgcttttctttctgtttttggggtccctgtcattctaaagtttgtccagccaatctgcttaggtttccacagtgggaacacagacacctttttttttttgagacggagtctccctccgtcacccaggctggagtgcagtggtgcaatcttggctcactgcaacctccgcctcctgggttcaagtgattcagcctcttgaatagctgcgactacaggcttgtgccaccacgcacggctaatttttgtatttttagtagacatggggtttcaccatgttggtcaggctggtctcgaactcctgatctcaagtgatccggccacctcagcctcccaaagtgttgggattacaggtgtgagccaccgtgcccggccagatgctgtttttttatgttgtctgggcagtcatttgtgcgctccatgaacagttgcatggtcctttttagcatcagactagagctatgattcccagcccacagtgacagaggccacctagccacctttgcaatggcaaccacattgacgatgacagtcttccttccttttcctttgtcttcagctgtggcaatcagcgggacactgctctgacccctggcattggttttgacaaatacttggctccttgttagctttattaataagatgaagagatatttgacagctacattctccccctaaaagaagaaggagtggcccacatggcttctggagttcttgggaactgacacaaaacttgcctcttggtggaggctgggtttgcctcaggtgggcccagaggagactccgcagctttaggaatcacctccctctctctcagctggctttttcttttttctttttttgacagagtctcgctctgtggcccaggctggagtgtggtggtgcaatctcggctcgctgcaacttccgcctcccaggtttactcgattctcttgcctcagccctctgagtagctgaaactacaggcgcatgccaccacgcctggctaatttttgtatttttagtatagacggggtttcaccatgttggccaagttggtctcaaactcctgacctcaagtgatccacctgcttcagcctcccaaagtgctgggattacaggcatgagccactgcgcctgacctttttgtatttttttaatagagacagggtttcgccatgttgcccaggctagtctcaaacccctggcctcaggtgatccgcctgctgtggcctcccaaagtgctgggattacagacatgagccaccatgcccagtctcatctggccttttaaaannnnnnnnnnnnnnnnnnnnnnnnnnnnnnnnnnnnnnnnnnnnnnnnnnnnnnnnnnnnnnnnnnnnnnnnnnnnnnnnnnnnnnnnnnnnnnnnnnnnnnnnnnnnnnnnnnnnnnnnnnnnnnnnnnnnnnnnnnnnnnnnnnnnnnnnnnnnnnnnnnnnnnnnnnnnnnnnnnnnnnnnnnnnnnnnnnntctttcatataaaacaatgcaattatttaggctgtgcaggatcggggtgtcaggtacttttcaggtctgaggtgaggccgtgggcagggcagcttctacccacctcatctcaactctcccttttcttgctcagtgtcacatgtaggaccagttacataatttgtgggtctagtgcaaatgaaaattcaaaattatcaggaatttcaaggtggcgacagcaaggcatcaaaccaagcatggcagcttctgagcacagggcccctgtgacggcacgggtcacacatctatgaagctggctctggtctcatgactcatgtgtgtcaggtcagggactgggtctgagccttctgcccagaaaggtgctgtaaaaggtcagtcacagaagccttgtagcaagccaggcagacacaggcaggcagatgtggtgctgggaacttggttgatgtttcacctcctggccctcagctccccatctgtaatatgggtcatgatacccctgtggtaggctgctgatgacccccaaggatatcaggccctgacccctggaacctgtgaatgttgccctatatggtgtcttagtttgtttggactgggtgccttagaaacaacaaaaatgggccgggcgcggtggctcacgcctgtaatcccagcactttgggaggctgaggcaggtggatcacctgaggttgggagttcaagatcagcttgaccaacacagagaaaccccatctctactaaaaacacaaaattagccaggcatggtggctcatgcctgtaatcccagttactcagctggctgaggcaggagaatcgcttgaacccgggaggcggaggtttcaatgagctgaaattgtgccattgcactccagcctgggcaacaagaatgagactccatctcaaaaaaaaaaaaaaaaaagaaacaacaaaaatgtatttctcacagttctggagtttgggaagtccagcatcaaagctccagcagctccagtgtctggtgaggcctacttcctcatttatagatggctgtctctctgctgtgtcctcacatgatggaaaggactagggaattcttttcttgccttttttttttttttttctgttttgagaaggagtcttgccctgtcacccgggctggagtgcagtggcgcggtctcggctgaccacaacctttgcctcctgggttcaagtgattctcgtgcctcagcctcccaagtaactgaggctacaggcgcgccaccatgccagctaatttttgtatttttagtagagataggattttgctacgttgtccaggctggtctcaaactcgtggcctcacgtcgatctgcccaccttggccacccaaagtgctgggattacaggcgtgagccaccgcaccgggcctagggatttttttatggtccctttcataagggcaccagtcccattcatgaggcctccaccctcatgacataaccacctccaaaggctccacctgcaagtactatcacactggggagttggttccaacatgtgaattgtcgcggggatgcaaacattcagtttgtaacatgtgggagaatgggatttgcagatgtgattaagttaacagttttgagttggggagattatctggatgggctccaaatgcaatcacaagtgactttaccagagaggcagagggaggcggggcacattggtttatgcctataatcccagcactttgagaggcccaggcaggagaatcccttgagctcaaaagttcaaggccaacctgggaaacatagcgagacctcatctttacaaataattaaaaaattatctaggcatggtggtgtgtgcctgtggtcccagctactcaggaggctgaggtgagagaatcactggtggtcaaggctgcagtgagtcgtgattgaaccactgcactccagccttggaaacagggtgagaccccatctcaaataaataaataaataataaataagggagattagacacacagaagagaggtgatgtgaagattgagcagagatttgaagatgctggccttgaagactggagtgatgcacccacagaccaaggaatgccagcagccaccaatctgctcctgtaagaggccaggaacagattctcctcccgcagagcctctgcagggagtgtagccctgctggcagcttgattttggtccattcatacttattctagatccagaatggggaaagaataagtttctgttgttttaagccaggaagtgtgtgggtatttgtcactgtagccacaggaaatgaaaacataccctctaaaatttttaaaataacagattcattgagatatagttcacatgccataccatttacctatttaaagcgtgcaattcaatggtgtttcatatattcagagttgtgcaaccatcaccccaatcaattttagaacattttcattatcccaaaaagaaacctgtattctttagctatcttgcctaatcccccagccctagccaaccaaactactttccatctccatggatttgcgtattctggacattgcatagaaatggaattatataatatgtggcctttcatgtgtagcttcttccacttagcatgtttttaaagttcatctatagtgtagcatgtatcagtatttcgttccttttgttgttgttgtttagagacagagtctcatgctatgacctgggccagagtgcagcggtgcaatcctagctcactgtagcctcaaagtcctgagctcaaacaagcctcccatctcagcctccagagtggctgggactaccggggcacaccaccacaccaggctaatttttaaaaattttttgagagaagttggtgggaggtgaaaaaaaaaattttttttttttggtagagccagggtctggctatgttgcccaggctagtctcaaactcctggctttaagcgattctccagcctcgggctcccaaagtgctgggattaccggtgtgagccaccatgccctgcccagtactttattctttttattgccaaataatattccattatatggctataacacattttgtttgctcattcatcagttgatgaacatttgtgttgtttctatattttggctattgtgaatactgcttctataaacatttgtgattttttttttttttgagacggagtcttgctctgttgccccaggctggagtgcagtggcgcgatctcggcttactgcaagctctgcctcccgggttcacaccattcttctgcctcagcctcccgagtagctgggactacaggtgcccaccaccacgcctggctaatttttttgtatttttagtagagacaggatttcaccgtgttagccaggatgacctcgatctcctcacctcatgatccacccgcctcggcctcccaaagtgctaggattacaggcgtgagccaccgtgcccagccctataaacatttgtgtgcatgtttttgtgtggacgtgttttcagctctcttgactatatccccaagggttgaattgctgctggatcacatggtaactctatttttaattttggggaaccaccaactgttttcaaagtggctgtatcattttacaatgccatagtagcatatgggcattcctgtttctctacatcctcatcaatatttgttgtctgtctttttggttatagttatcctagtgggtatgaagtggtatctcattgtagttttgatttgcaattccctaatgactaatgatgttgagcatcttttcatgtgcttggggtcattttttttttttatcttcttaggagaaataatctgctcaaatccttttttttttttttttttttttaagatggagtctcattcactctattgcccaggctggannnnnnnnnnnnnnnnnnnntctcattcactctattgcccaggctgggagtgcagtgacatgatctcagctcactgcaacctctgcctcctggggaacaagcgattctcctgcctcagcctcctgagctcctgagtatctgggattataggcatgtgccaccgcccggctaattttttgcatttttagctgagatggggtttcaccatattggcccagggctggtcttggaactcctgaccttgagtgatcctcctgcctcaggctccccaagtgctgggattacaggcgtgagccaccacgccctgcccctttgccaattctttaaaatggttgtgtttttgttgttgagttgtaacagttctttatatattcaagatcctagacccttatcagatatattatttccaaatattttctcccattctgtgaattacctttcactttcctaatgctatcctttgcaataaaaacatttttaattttaatacagtctagtttatctgtttttgttattttgttgcttgtgcttttgtggttttgagaacagaatgcacaaacacctgttttggcttcagtgcctgggacatggtggtgctcttcccaggccagcggccaggccactcagggtggaagacagtaggtcccttaaccccttgggctgttgtgtgcctgatctgttgtcaggcccttcttcattaggtttagaagatacagtcatcagaagaataaaaccactgtctaggtaaaagaaatttttaaatatataatatgaatatcttcttatttataccagtacagtttcaaaatgtaatttttttttttttgtggaggaagaggtctacaaaggcaaaaatgcctatggttatgagtcataatacaaccatgtcagccaggtgcggtggctcatgcctataatcccagcactttgggaggccgaggcgtgcaaatcgcttgagctcaggagttcaagaccagcctgggcaatgtgacgagaccccatctctacaaaaattaccaaaattagccggatgtggtggtgcatgcctacagtcccagctactcgagaggctgaggtgggaggatggcttgaacctgagaggcggaggttgcagtgagctgtgatcacaccgctgcactccagcatgtgcaacagaacaagaacctgtctcaaaaaaaaccccaaaaaatcccaaaaacaaaacaaccatgtcccttgtaactggagggggcctcctgcaggggatggaatagcacagactcctccacaatgtccctgcctgcctcccttttgcccagctgcccaactttgtgaggggccagaccggggtggtgagggcagcatatggtgggtgtggaagaaaaggcactgagcgctgccccttgggttcactaagtcagctgagctccagagcagcgattcagatgtggcaggcccagccaaaccagatcaacaactgttgttattattgttcaatcataactattgttttttttaaactttttaattaattattattactttttgagacaaggtcttgccctgttgcccaggttagagtacagtggtgtgatcgtggctcactgcagcctcaaactcctgggcttaagcattgctcccacctcagcttcacgagtagttgggaccacaggcatgcaccaccgtatgcagctattttttatatttttttgttgttactatgttcttactgtgctctgctggttaaatgtgctttcaaaggctagctcttgtttgatcttcctaacaagcctattcaatgggtagatgggcacattattcccattatataggtgaggaacatgagcctcagagcatttaagctattaagctgcagagaacagacagggaacccaggcttctgatttacgcattagtgcacgttcactcccaggctggggtgtgtcccaaacccagtggatgggggctgttgagtctggctcatcaactctccaagactaatgagatctgaggctacaggtgggggaaatggaacggccggtgaatctcatttccaatcaccattgtcatgaaataggtggttggcctgctgtgccctccgacatgtctgttgcccacctgcctccgccttcctccccccactccacctccagttgctcagaaaaaccacttcctgaagtttattccagcagacagctttttctgtgcagttaacgagtcgctatgtttcggatctgcgttacttccccggtatttgaaggcaggagcactgcaggtaggaataactgtgtgtctgtcctccttcaattctgcttggctgagaagaagcgaacaacaccatgggagaaacagggtcctgggtgagtttgttaagcctggtgggaactcctggggtcccttggttatgtaggagtcagtctcttgatcagttaccaagaagccaaagccgtgtgggaacctttgcctcaacccaatcaaggaatccaccaaggtcaaggggaagaagtgaggagaaaggagaggcccacaaacgaataaaaacccattcaatttactatattgaaaaaggccaggccaggcatagtggctcatgcctataatcccagcactttgggaggctgaggctggaggatcttctgagacaagaagctggattccagcctgggcaagaccctgtctctacaaaaagtaaaaaattagctgtgcgtggtggtgcacacctgtagtcccagctacttgggaggctgaggtgggaggattgcttgagctcaggagtttgaggctgccgtgagccatgattgtgccactgcactccagcctaggagacagagtgagaccctgtctcaaaaaaaagatgttggctgggtgcggtggttcatgcctgtaatctcagcactttgggaggttgaggtgggcggattgcttatggtcaggagtttgagaccagcctggccaacatggtgacatcccatctctactaaaaatacaaaaattagctgggcatggtggtgcacacctgtgatcccagctactcgggaggctgaggcaggagagttgcttgaacccaggaggcagaggttgcagcaagccaagattgcggcactgcactccagcctgggccacagagcaagaccctgtctcaaaaaaaaaaaaaaaaaaaaaaaaggccaggcgcggtggctcacgcctgtaatcccagcactttgggaggccgaggcgggcggatcacgaggtcaggagatcgagaccatcctggctaacacggtgaaaccctgtctctactaaaaatacaaaaaataagccaggcgtggtggcaggtgcctgtaatcccagctactccagaggctgaggcagagaattgcttgaacctgggaggtggaggttgcagtgagccgagattgtgccactgtgctccagcctgggcaacagagagagactctgtctcaaaaaaaaaaaaaaaaagaaaaagaaaaaagacacaccaaagataatgataataataataaaaggtacatactgtatgaatctttacaaaattccagaacatggaaactaatcagaaagcagatcaatctttgcagtggggagggtgcagagggcaagggagacgaggggcataggaaccttttgggggtggtggatgtgtctgcttccttgattgtggaggttgtttcatcagtatacacatgtcaacacttttctgagtgtatactttaaacacagcttattttatgtcaattatataatacttcataaagctgaacagaaattcaatttcttaattaaaattttaaaggtaatactgccgggcacggtggctcccgcctgtaatcccagcagtttgggagaccaaggtgggtgggtggatcacccgaggtcaggagttcaagaccagtctggccaacacggtgaaaccccatctctactaaaaatacgaaaattagctgggcatggtggcacatgcctgtagtcccagctactcaggaggctgaggcaggagaatcacttgaaccctggaggtggaggttgcagtgagctgagatagtgccactgcacaacagcctgggcaacagcgcaagactccatctcaaaaaaaaaaagaaaaaagtgaaagggtaatacagtcacatgatttaaataacaaaagtacagaaagctttacaaagaaaagtccccaactgctcagtttctgccacccacccctctgccacagataataagaatcctttgcatccttactgactttctacaagttaatgtttaccctcccctactgattgtaaagtattctagtctactgtaaatagcaagtcaaacaaacgttaataaccttagagtgtgaggtaaaccctggacaggcatgcagtactcatttttgcctatttccaatttcagatactttttcttacattatggaaactatctgttcatattctttgcccatttttctattggattgttggtcttttctttttcttcttctcttttattttctttcttttaatcaggcagcctcccaagccagagtagcttagacagactcccgaactttttcttcttaatttatgagtgttcttcacacactagggaagttagctctttgtccgtgatgtgagttgcaaacattttttccagttagtagtttttctcttgactaattttttttttttttttttttggcaaaacagaacttttttttcataaagtacaatttatcaatcaattttatggcttctggattttaagttttagttaaaccagcctctgccattcaaggttgtaaggacttcttttcttcttttgtattttcttctagaactttttttttttttttttttttgcgagacagagtcttgctctgttgcccaggctgaagtgcagtggcatgatcttggctcattgcaacctctgcctcccaggttcaagtgattctcctgcctcagcttcccaagtagctgggactacaggcatgtgccaccacgcctagctaatttttgtattttttagtagagacagggtttcactatatgtgggccaggctggccttgaacccctgacctcaggtgatctgcccacctcggcctcccaaagtgctgggattacaagcatgagccactgtgcctggccccttctaggactcttatgggtttatttgtacattcatatcactggtccatttggaatgtattctggtacacagtgtgaattatgggatacaatttttcaattttctaaaaaaaacatttatttttgaaataaagctttattttatcatggtatcctgaaaatattagaatcatttatgaagcaattgccacattttagaaatttactttggaacttgagggcacggggtctggggtcttggcatttatcactatcatttgaattgttgctctgcaaaaggtgcttactctgcagtgtctaaaaattaccattgaagccaaaatttattttattaatcatggtgtttccttttctgttcccacatcaaaatttggtagatgggtgagggtaatttccagtaggttgccaaagaagatagcttatagtggggaatggcgagcacaaaacaacagcaaataacgcaatggaaaacattcctttagaaataaatgggtaaagtgtgtattgctgttcaaggctcttatcaaaacttccactgaaccataggtcagagagaggaattgttttctagctggaagccattacttcttggttcttgccctgaggtagaggaatctggttttgactgtggccagtttgtatctgtcttagctttaccatggggaagtcctagagggtggcatttcagaaacaatatggcaccctcaaggcagtgatcatctgattcagacaatacagtagtttgtcttcatccatctagacaatcatccattgcactaatgctttttcatcatctactaggttccagacactgtccctgtcatcaaggagattgcagtccatttgggggaggacaggccattatgacacatcctataataaaagtgtctggctgggcgcggtggctcacgcctgtaatcccagcactttgggaggctgaggtgggtggatcacaaggtcaggaggtcgagaccatcctggctaacacggtgaaacccgtctctactaaaaatacaaaaaattagccgggtgtggtggggggcgcctgtagtcccagctacttgggaggctgaggcaggagaatggcgtgaacccgggaggcagagcttgcagtgagccaggattgcgccactgcactccagcctgggcgacagagcgagactccatctcaaaaaaaaataaaagggtccgacagctgggcccggtggctcacacctgtaatcccagcactttgggaggccaaggtgggcgatcacctgaggtcaggagttcaagaccagcctggctaacatggtgaaaccccgtctctactaaaaatacaaaaattatccgggcatggtgacgcatgcctgtaattctagctacttgggaggctgaggtaggagaattgcctgaacccgtgaggtggaggttgcagtgagccaagatcacgccaccgcactctagcctgggcgacagagcaagactctgtctcaaaaaaaaaaaaagtatccgacagagggaaaaccagggaggtaagggggttgcagaggaagggcagctcagtctggggaagacgaggaaaaattctggagaaatggattcctgaactgagttaggaaggatgggtaggaatttgcttggaaagaagtggggaaggcattccaagtaggggagcagccccgacaaaggcacagacagatgaagagtgctaggaactagaaattctagcagccataatgtaggtgcaaggaaggaagtggtgagagactaggcttgaaaggtaagcaaaggctgtattatggcaggctgtaaattgactttttctggtctcaaacagaggagtgaaaggaaatgatgtatatcttttttttttttgagacagtgtttcactcttgtcccccaggttggagtgcaatggcgtgatctcagctcactgcaacctccacctcccaggttcaagcgattctcctacctcagtctcctgagtacctgggattacaggcatgcgccaccacacccgattaatttttgtatttttagtaaggacggagtttctccatgttggtcaggctggtctcgaactcctgacctcaggtgatccgcccgcctcggcctcccaaagtgctaggattacaggcatgagccaccacgcccagcagaaatgatgtatatcttaggaagctcccgcatagtggcccagtagagtacgcatttgtttaggggtgcatgctggggaggggcctctcatagggctgcgtatgtcacccacaccaaaagctgaggagagcttcctagttctgttaccagatggtgccgcgcagctccaggctgttggtgccatgaacaaagaattggacatgacacacgtacaaatagcgaagcagcaaatgattaagcacagcgacactctcggagaggggtgagtgggctgacctgtgagtggttatcagtgccggtttgttacatttcacggccttttacatgtttttcctcacttgcttaatgtcacttgcctttctcttatagtgccttcaccctactttatttcttgtaagatagttgttcaaccttgtttacccccactttacctcttctgaccaaattgcccatctttacttttattttttgcgaccaaatagctactggaagtccttccaacttacttctcttaccatgtcccaacttactgcttactcccttatctattatattactttttgtggcaatatttgattgatgttttaaattacagactataaagaaacaccataaaatattaagacagtctgagagattttgatgtgttattaatatccacatggtttgcttcttttccaaagcatcccataacgtttgactctatgactgtaacaagttagatttttagaaactgatgcaaaggatcagattctagtagtttctttctctttttttttttttttgagatggagtttcacttctgtcgcctaggctagagtgcagtggtgccatctcggctcactgcaacctccgccttctgagttcttctgcctcagcctcctaagtagctgggattacaggtgccggccttcatgcccggctaaggctaatttttgtatttttagtagagacgggtttctccctgttggccaggttggtcttcaactcctgacctcaagtcatcctcccgccttggcctcccaaagtgctgggattacaggcatgagccatcgcgctctgccagattctagtattttctaccatcaaaatatctattacccaatgaaaagtctaaaggccaatcttttttttttttttgagacaaagtcttgctctgtcaccccaggctggagtgcagtggttcgatctcggctcactgcaacctccgcctcccgggttcaagcgattctcctgcctcagcctcttgggtagctgggattataggcgtgtgccaccgtgcctggctaatttttgtatttttattggagacagggtttcaccatgttggccaggctggtctgaaactcctgacctcaggcaatcctcctacctcagcctctcaaagtgctgggattaccggcatgagccacgactcccggccccaaaggtcaatcttaaagctacaaggtatcttttaaaaggagtaggaataacgtattttgaggcttaaaggagtaggaatagtgtatttttagatttgaagccatcttctaaagggtacgatatttggttaacatgtcactccttatcgccatggaagaagttaattctattcttttttttttttttttgagatggagtctcactctgttgcccaggctggagtacaatggtgtgatctcagctcactgcaacctctgcctcctgggttcaagcaattctcctgcctcagcctcctgagtagctgggattacaggggttctccaccatgcctgtctaatttttgtatttttttttttagtagaggtggagtttcaccatgttggtcaggctggtctcaaacccctaacctcatgatccgcccgccttggcctcccaaagtgctgggattacaggcgtgagccaccatgcccagccgttaattctattcttactgcttactcccttattttgtatgttcttcttctatcttacatcttttgcttttgctattgcttaagctagcctacgcccaagggtgctctttgccccctacttcctctgctattctctcgcctcagttccgctgcattccaagctcagcctgccccagcagcaggtctctttgacaaacctgcaattttggggaaaagtcagcccaagaaaggcagggggcccagacttatgctgtgtggcaaaagccctctttgatgggggaaggggaggactggaaaagcagagagatctttctggatgtcctgggagagcagccctttgggtggtgggtggaggctggaggcagggaggaatcccctcacagtgccatgagaagggcccccaaacccaggcgagacagagggagggtcaagaacgccaaggcaaatgtcacttgtgccttgttttttccctaaagaaactaaacaaagcggccgcgttcggtggcccctcaggaaggccggtcatttcctgaggagatatcaggccagcccaggccccattgttcccggtttccagccatggctgccattacctgaccagcgccacagccggtctctctgcaggcgccgggagaagtgaccagagcaatttctgcttttcacagggcgggtttctcaacggtgacttgtgggcagtgccttctgctgagcgagtcatggcccgaaggcagaactaactgtgcctgcagtcttcactctcaggatgcagccgaggtgggcccaaggggccacgatgtggcttggagtcctgctgacccttctgctctgtgagtgtttactctgtttccacatcactttaactccatgagcatcgaagcttctggaatcaacatgtttcttatgtttcttgcaggttcaagccttgagggtcaagaaaactgtaagtctgatgtttccactgtaacagatgtttctacctggcttcctcctttctcttctgtgatgcctaaaacgcacattaaattgctggggtttgatacttctaacaattaaggaaaagaatccaattgagaactaaagtttatcccatgtgggcatttttagaaaggcttagatctaagccaagttctggtcagtgtgttttagaagtagcacacgtttccttggctggtctgaaagtagtgggttatcttgatgaattgtttagtcagttacagatcaaactccatgttcttttctctgttctcacgactactcttgactagtctaaaaatatattaggttgttgaaaagtaattgtggtttttgccattacttttttaaaagatggcaaaaaacacaattataagtagcacacattttcttttttttttccttttttttttgagacagagtctctgttacccaggctggagtgcagtggtgcaatcccggctctctgcaaactccgcctcctgggttcaagggattctcctgtctcagcctcctaagtagctggaattagaggcgcatgccaccaggcccggctaatttttgtatttttagtagagacagggtttcaccatgttggccaggctggtctcaaactcctgacctcaggtgatccgctggcctccacctcccaaagtgctgggattacaggtgtgagccaccacgcccggcctcacattttctagatttcagtgcattgctgttttttgggatggggaagtgatttttttattttaatgagcaattccataattagttttttgttgttttaccataatggcttatttgaatattgtaacctatccccaactgtttttatttgcaaatgagatataattgatttgttagacatatgaagacagatcctagtttaaattgttgctactttttttactcctaaatgataaaaatcacacactggagctcattttccattcacctgtgaggctacaagtatatctgtaatattttgtgcttgtacaaagggaagtggggtgctgcctatctttgaagcctggtttatcttccactttacagctaattttgaacctttgtcttgagatgagagggttttgttctgcttcttctgggaccacatgaatgagggggctcagtagtgtcccggggctgtgaatagagggagagcccacagaacactatttccttgtcagaagtcactgcaatcagcaaagaatggaggtgactgggttgcaggcaaattgcacagctctttggaggtgaagtccatgggcaaggctagctggtgagtcaagcctcggagcagtggccccaggctggggagggctagttggccactggcaaagcccctctgccaggcttctctgctcaactgtaggtgcttccttgggcatttgatccccatggcaacccacggaggcaggatatccataatcttcataattatcctgctggactgatggtgtcaccaagcctcagaaataaccgattttaccagccgtgttggctcacacctgtaatcccagcactttgggaggccaaggtggtcgaatcacttgaagccaggagttcaaaaccagcctggccaaaacagtgaaaccccgtctctactaaaaatacaaaaaattagctggacatggtggcacatgcctgtaatcccagctactcgggaggcaggggcatgagaattgcttgaacccgggaggcagaggttcggtgagccaggattgcgccactgcactccagcctgggcaacggagcaggactttgtctcagaaaaaaagaaagaaagaaagaaagaaccgatttgtccacgagagaggcagttggctgggcactgggactggaacttccactctctgaagctgcaccatttgtctggagccataggcctgactcaagtcttttagaccagttttacttaagctctttgatttgttttcccaatctgtaacatggggatgataagagaacttcgtgggcatgaagtgggtgtgaggttgagactggataaaaggaggtgattaattggcccccgcctcgaggtgattgataaatgacaatggtgtttactacacggtcctagcccccctttacgactgtgactcctgccctacccactctccctttgtccactccagccctcgtaccctcccagaccacaccctttgggccagaccctgccctgcagacactcacgctttggggtccctctttttcttacccacaacatcctgtttcccaaaaccgtggtgctctcccctctccccctccacaccacatggaagtcaattgctccctcctttgggttcctagagaatgaatgttctttgtaccttcagggaagacgttggaactgcagcacatggcacagggagcgactctcccactgcctcctcaggcctctgccttgttttacactcaaggaaacagacccaggggccacaaggcaccaagcaagcagggtcaacactgggggtgggcagggcggcggctggaaccaggtctccattccttaggccccctaggccagcatttgcagtgcgtggcctgcaggcttgctctgagtctcccgctctgcggctggggtcctgggacagcctcggccctttcccttccttccatctcaggcctctttgttcccctccagcccgcacctcactgcagctgcctcacctcaggaggtgacggctgctccgtcttcacctagaaaacagtcatctggagggaactccctcaacttcccgcctgggcctggctgcaggcttatcagcctctccacccatcctctcggtttccctcccggcctcggaggacacatgcaccctgctcctcagctgatgggggccagccaggcacttaggctgagacccttcctcacccccaggaccccacgcctacgtgcattcaagtccctctcccctaccaccacttctagaatctctatttctgcttctggctctgttctctcagtgaatgggaactcttttttttaggaaaaagaaaaatcacaagcagacacccacccccaccgtttatctggtgtccccctatctggcctttctagtttcctttctcagtcgaacctctctgaaagttagtttataatctgtgcctacccccctcacctctcagacacgcctcgcctcccagcagcctggcctcaggccccacttctccggctgttgggtctcctcttgctgaggggtcaccaaggaccacctgatgccaaatgcaacggacacttccagccctcggctccctgtacccctttcctgcctttgacttttgatcgtgccccaaagcctcgctccttgaccttttccatcctcttccctgctttgtctcctcactctctaacaaaccctcttccttctcccccatggctgactttggacttactttgtcttctcctggagtctgaaccctgtcctggtctctgcgggctcctggtcttatcctccctggagaccagctcccctctcaacacctccacattcccccctcctcccctaagttcacactcctcccaccttcacagtccagccctggcctctgccctgagcctccagttaacacaggctgacctttgatgtctcctcccagtcctcctactggcccctcacacgcagctgcaccaccatcactttgtcttccttccttatctttttctgtttgtttgtttgtttttgtagagactggggtctcattttgttgcccaggctggtctcaaactcctgggctgaagccatcctcctgcctcggcctccgaaagtgctgggataacagatatgagccaccacacacagctgcgtgtggcattttctattttagtttggtggcacacacatcctcctgggaatctaatccaggaagtttatcttccattctttcaaccccatatccaatcaaacaaagtctttttttaaattgtggtaaaatacaaataatataacatttattattaatgacatttagtacattcacggtgttgtgcaaccatcaccattgtctaattctagaacattttctttctttttctttttttttttttttttgacagagtctcactcttgttgcccaggctggagtgcagtggttggatctcagctcactgcaaccttcacctcccagattcaagcaattctcctgcctcaccctcctgagtagctgcaattacaggcacgaaccaccatgcccggctaatttttgtatttttagtagagacaaggttttgccatgttggccaggctattctcaaactcctgaccttaagtgatccacctgtcttggcctcccgaagtgctgggattcattctagaacattttcaacaccccagaaacaagtcctgttgagtccactcaggagatccccagcctatccttccctcatccccactgcacccgcctagctcaggcctcatcagctttcacctgaaccacttccaagctgtttactggccttgggtgctgtcacacccctcctgacaccctcaggacagggcccagcttgtcagcacagcaggccagccctccattctggcacgacagacccagccacctggcctctctagccccacactctggtttctgtaatgggccatgcccagaaggcacggatttctcacaccctcgtgtcctgggacacgctgttctcttacctggagcaccccactgcctgtccttggcctggcaggctcagttcagtggtcacttccttcagactccttgacctctcctgggcagcccttcctcttggtgcttactgatatcactggagtccagctatgtgggccccagcaacctttgctgtttgggacagcaaggatgatttcttacttactctgtcagcccagcacctggcacaggttctcgacacatgtctcatggatgggaacttgaactgaacttggagatgcttgagattcgggtaggaagatggctcagcatgctctctgatgagcacagaagttcatcagggactctatgcttcgtggctcccagtaattttcctgacgagggtgggcagcccctccttctcctgcaccctccactttctctctgagtcatttccaggttgagggccagggggctggctgactcatggtgccgcatgtttccagggagcaccaccatccactgatgagtggccttgaggtcaaggtcccactgtttttagcatgttggggtttggcactgtggtcactggctgttccgtggtgactttccaaatttagatccttctccgtcaaccttcatctccccgggttgaaaagatctgacctctttaggctgtcccacagccccacccttcatcacaatagtcctgaaactttttgggttcagtaaggaaatctgtgggccttctctccagaaaaagcacacatttgcacacaattggaggtagttgatgagcctcctaacacccacccatgcacctcccaggggctgtgtcccccaggttgtgaacagtcactctgtgtaaatagtgagacctacaggcagtaattcagtttggctgtgcttggctggtttatttagaaagatgataatgttttccatattatcaaaacaagaatcaggcagagacttttgaagtttggttgcgtggtatatttgttacctattgctgcttaacaatttacctaaaacttactggcttaagataacacagatttattatcctgaagtttctgagggtcaggaatgcaggagtggctgagttgggtggtgctggcaccgggtctcattagattgcagataaattgttggtcagggttgcggttatctgaaggcttgactgagtctggggaatctgcttccaagctcactcctgtggctatgggctggaggccttagttcctcatcctgggtaccttccacagggctgcttatgctatgactgctggcattccccagaatgagggatcccagacaggagagagagtgatcaggataaaagctgcattgtcttttattacctgatggagtattttgttggttaatgttaacgtgggaggtgaccacgtgtaagtgtgatgagcagagggcaaggaccattggggggggcatcttgaagggcttctatagcaagggaggtggtggtggttgtggcggtaaaaactaggtcactgtttttgttgttttgtcgatgatatttgtgttaagatgaagagctgagactcatatctcaacagagtttataaaatgcttttcttttttccatcctgccctctcttctcccttgtctgttcgagctagccatgggaatgtggtgttcctgccagtgcatccattgagttcgtttattgttaatttatttattttctgagatggagtttttgctctattgctcaggctggagtgcaatgatgtgatcttggctcactgcaacctctacctcctggattcaagtgattctcctgcctcagcctcctgagtagctgggatgacaagtgcccgctaccatgcccggctaatttttgtatttttagtaaaggctaggtttcaccatgttggccagcgggtctcgaactcttgacctcaggtgatccaccgacctaggcctcccaaagagctgggattacaggtgtgagccgccacaccctgccgagtttgtttatttgagcagataatgtgtgttagagttgcttagaaaaacaagatggtggacgggccccatgctagtgggtaccatccctactggaaaaaccactgcttggtgcattagccaaatttgctttaaaattgttttttaaaaagggagggcttttataaaaatcaaatgaactaggactggttagtgggaggctcacgcaagggttgtgctgaggctggaaggcccagagtaggaagagttgtggagtgcagaatgagctctccaagggcagacactgccagcctcactgttctctgaacccccagtatgggggacagtgcttggcacagaaaaacccccttaaatgtttgctatgaatggtgctaaggaagaaggcagagaatgtcaaccagaggccaggcactgggcaatatatacacggccccttctgtgccctcagccactttggcgcagtcactgtttaggttaaagataccagagaaggcaggtattcatgttcctacttcgtaggcagagacgtggtggcccagagaggttaaataactcccgagatcacccagctaagcactgtgggatcacgggtttgaatctggtatgtctgactcccttctgtacccagcactgtctgctggtctagggcataaccagccagggatgggcagctcgttcagtaaacaggagagcagatgaatgactcgtgtggagagcacgcagtggagtgagcaaaactgggaggctggagaagtcgctttaaattaacctgaaaatgtttaatatgctttttattttgtttattttttttgagatggagtctatctttgttgcccaggctggagtgcagtggtgcaatctcggctcactgcaatatccacctcccaggttcaagtgattcttctgcctcagcctcccgagtagatgggattacaggcaactgccaccacgcctggctagtttttgtatctttaatagagatggggtttcaccatgttagccaggaggctggtctcgaactcctgacctcaagtgatctgcccagctcagcctcccaaagttctgggattacaggcatgagccaccacgcccagccttaaatatggtttttatttgaaaaaaaaaaaaatccctagaaacatgtagtggagacacagctttaaagctctgaatagttgattttcagctcatgcctgtaatcccagcacttggggaggctgaggcgggatgattgcttgaggccaggcgtttaagaatagcctggacaacatagtaagaccccatctctaaaaaattaaaattaaaaaataaaaaaagagtcgactttatttctgtaactggaagaatctagctaacatttctcaagcactttataggtgccaggaactctactttaagtaattaaactcaggttctcatttatacttacattccttgtgcctattgtatggataagcaaactgaggctcagagaaatttagggacttgccaaaggtcacacagctttgttagtagcagagatgagatttggcccaggtctggctccgtgcacttgatttctgctctttagtatctcctggttgagtcactggaatacacagcatagcttaaaatgaaggaggaagtactgaagaggtaatggaaggagacctaactgtctctgagagggaagagagtggttgggagggaactatattaattgaggagtgcagagaaattaatatggtccaaaggaaaaaaaggtttttttgagatggagttttgctcttatttcccaggctggagtgcaatggcatgaccttggctcactgcaacctctgcctcccaggttcaagcagttctcctgcctcagtctcccaagtagctgggattacaggcgcccaccaccacacccggctaattttgtatttttagtagagatgaggtttcaccatgttggccaggctggtcttgaactcctgacctcaagtgatccacccgcctcggcctcccaaagtgctgggattacaggcataaaccaccgtgcccggctggtccaaagaaagttgtgtgtcgagagctcatccagcaggcttcttaaatcaggagcttgtaagttgcatataaagacaaaaaagggagttccaaagagtaatgctgtgggaaatgacttgaatttaaaccgtcaccttgtttcatctcatggactggtcagacaccatttttgttgtcgttgttgttgttaaattaattgctcagaatatagcagcaggcgcaaattgtagtactcgttttaaaattgaagattaaattttaaattacccaacaaaggcctaactttgttaaaagagagggaaaggacaggttctgccagtatctctggccagctagctaactaacttttttcttattccaaaaaaatgacttgggaccacttataaaaattatgtattgttcaatgagatacaattaatgaggaaatcaggatgagagaaaaataaaggcagggaaataaagctatggcccatttagcacaaacgcatcccaaagattgctagaagcagaggtgaaatttttgctgtgtgttaacaatcaaagcaaaaagaggaacaaggtccattagaacattctcagaatccacaagatagaaatgaatcagttgttcagcataaacacagtgtttcctggtgctgttggaacactttgtgaaattagggacaatatctcatcaacatcccagaccaacatcccaaaagaccatttaatagcttgcatctgtgcttctccctaccccatagcccctccctccagagatgaccactatgctgacttgtaaaatattaatcttatatccagccacctttctttttcgtttgtttgtttgtgtttttgcagacagagtcttattctgtcgcccagtgcagtgttgtgatctcaacttactgcaacctgtgcctcccaggttcaagtgattcccctgcctcagcctcccaagtagctgggattacaggtgcatgccacaatgcctggctaatttttgtatttttggtagagacggggtttcaccatgttagccaggctgatctcgaactcctggcctcccacagtgctgggattacaggtgtgagctgccattcctggccttatccagccacctttctaaactcacatttatttctaataatttgtctgcagactctttgaggtttttacatatcatgtcatctgtctttgagagttttaaacattggactgctccattcactcaaaaattttaaaaaattccatgattgcattattcatacttcatggagatagatggggggctaagaaagcataccagacatagtcactttcaatcccaggtccaaatgctggataggtagcttccttgagaatgggcatggtagaaatttctggggggacgtgtagggatttgggaaaaacacctggttttatggtcatggactttcagtacatttttttccaaatcccctacagatcaattactttttctcttttttatacttatttaattttttttagatggagtttcgctcttgttgcccaggctggagtgcaatggcgcgatctcagctcactgcaacctctgcatcccgggctcaagcgattctcctgcctcagcctactaagtagctgggattacaggcatgtaccacacccggctaattttgtatttttagtagagacagggtttcaccatgttggtcaggctggtcttaaactcctgacctcaggtgattcacccaccttggcctctcaaagtgctgggattacagccgtgagccactgcgcctggcctcttttctttcttttttttttttttgagacaggatctcactctgtcacctaggctggagtgcactggcatgatcatggctcacttcagcctcgacctcccaggctcaggtgatcctcccacctcagcctcctgagtagctgggactacagacacatgccatcatgcccagctgattcttttgtatttttgtagagtcagggttttgccatgttgcccaggctggtctcgaacttctgggctcaagcgatcctcctgcctcggcctcccaaaattctgggattacaggtgtgagccactgcacctagcttcatccatattttttttagccatgtatagaacatgagatgtttgaagttgttttctgacaggaatttggagagtgaatattttatggtgctgattaaacccagattcatgtgcttggaaaagacaaccacagggaagctagtgagtgctttgagatatgtcaaggggtaaaactaagaccacaagtgggctgcagaagcacctacaggcattgccaagaggatctccaaaaagcagttcaccctggtctgctctgaagtttggatacaagtcctgacccatgggcatggttcaggatcttctagcctggaaaattttcagggcagttgcccacaaccaaccaactgacaaaaacacagcaatagctagagagcacccaattttaagcaatccacccttccgtcagcctgctactgtgaatgagcctcaatatgtgatctgtagttagctgaattctattgacagcctatggttactggatataagccaattctgttctggggacttgccagaaatgacacaattggccagttgacccacagcctagttcctagcagagattggatagctgattgagcattgtggctgttttgaggcttgaccagagattcctgccgttggcagaggggaatctgtagtctttgcttcttggtagcaggtgaggctgaaaacgcaagtagcaggctaaaaactggtttcaagtcctcaccatctggtgaaacctcagagcccatcagatagaaaatgccagctgggactgtgctaattcggtaaggcctgggtggagaaggagggcctgggcacgaccatctggtttcggaatggaggtagcagtcatttattaagcacttaatgtatatcgggcactgtacaggagacgttctggctgttctcctgtacatttcctgcaaagacctaatgagatatgattactccatcctacaggtaaggaaactgagctcagagagtctagctgcccagggtcacacagtaaatgatgagccaggacttgaacacttgactgcttgaatcctgtactccctccaggggccaagatgtggcagctcacagaatgcctatatctttttttttttttgtcttttgagacagtctcactctgtcgcccaggctggagtgcagtggtgagatctcacctcactgcaacccccgcctcccaggttcaagtgattcttgtgcctcagcctctcaagtagctgggattacaggcctgcaccaccaaacctggctaatttttgtatttttagtagagagggggtttcaccatgttggccaggccagtctctaactgctgacctcaggtgatccacccaccttggtctcccaaagtgctgggattataggcgtgagccaccatacctagctctacatctttatcacactctgttcctttgccttggtgggaaaagttgcagcttagtaccaactgcctcctgcttgagccactgtgcacagttactatcagcctggccctgtaggcacgtagaacccctggactcaatactgcataggatgggataagaccacatctgatgtggtgaaggtcaccgggatgatgttgtttctgagataacaggtatgtctgccttccttccctttgcatttagctttcacaatcaacagtgttgacatgaagagcctgccggactggacggtgcaaaatgggaagaacctgaccctgcagtgcttcgcggatgtcagcaccacctctcacgtcaagcctcagcaccagatgctgttctataaggatgacgtgctgttttacaacatctcctccatgaagagcacagagagttattttattcctgaagtccggatctatgactcagggacatataaatgtactgtgattgtgaacaacaaagagaaaaccactgcagagtaccaggtgttggtggaaggtgagtccttggaactgagcacaggcaagcagatggagcaaagcacacagtggcgtgaataacagctgtgaatgaatagtgacactggacttaactctccacccatcaccctctcattcatctgcctggcattttccttacctgaatacgtaagcactagacatattcccaataggccaggcccttccttccttccttccttcctttctttctttgatggagtctcactctgtcacccagtctggagtgcagtggtgtgatctcggctcactgcaacctctgcctcccaggttcaagcgattctcctgcctcagcctcccaagtaattgggattacaggtgtgtgccaccacacctggctaattttgtatttttagtagagatggggtttcactgtgttggtcaggctggtctcgaactcctgacctcaagtgatccacctgccttggcctcccaaaatgcttcttcatctcgtctcataaattaaaatttcttcttcaagactcaactcaatgatgtcttctctttccaaaacaaaatgggtctaccccagggtgccagtcagtacagctctgatgctctctctacattcaatggtatttgtgtgtataaaggccacagcggtgtgttaagacacctcgttctgcagtcactctgcctgggtttcaatctgggcaagtcccttaacagctctaaacttcaaaatcctcaccagtaaaaggaagataacaacgatacccatttcaggcaattattgagagggttaaaagtgtcatgtgggtagagtgcttagcaaaatttccagcacctagtgagttcctaataaatagaaatgtatttatttattttgagacagagtcttcctctgtcacccaggctaaagagcaatggcgcgaccttggctcactgcaacctctgtctcctgggttcaagcgattctcctgtctcagcctcccaagcaactgggattacaggcacgcgccactgtgcctggctaattttttgtatttttagtaaggatggggttttaccatgttggccagcctggtctcgaactcctaacttcaagtgatttacccaccttggcctcccagagtgtcaggattacaggtgtgagccaccatgcccggtccacaaatattctatttcactcagtattgccatccgttcttacacatctgtctgctcttctggatagtgaaattgtaaagacagagatggtgtttggtttattcttatatcttgaacaatgaatctggctcatagtaggcattcagtcaatgttcatggaataaattaaagtcagtcctagcctgtggctgcattcaataaagggtaacaacaatcacagtgacactgacaaatactggctacctttcccctctaagcatcatctgttgggaatctgattgtgtcctcttcccaataggattataaatcattgaaaacaccaagtacatcttgaccatattttattttttaaatttatttatttatttatttatttatttttagacagagtctcactctgttgcccaggctggagggcagtggcacgatctcagctcactgcaacctctgccttcggggttcaagcaattctcctgcctcagcctcccaagtagctgggattacaggtgcctgccaccatgcccggctaattttttgtatttttaatagagatggggtttcgccatgttggccaggctggtctcaaactcctgacctcaggtgatccacctgcctcagcctcccaaagtgttgagattacagatgtgagccacctcgcgtggccttagtggtgattttggtggacccatcacccgagcagtgtacactgtacccagtgtgtagtcttttatccctcgctccctcccactctttcccctgagtccccaaagtccactgtatcattcttatgcctttgtttcctcatagcttagctcccattgagcatattttatattttttcctttcttttcttctcttttttgagacagggtctctgttgcccaggctggagtgcagtggtgggatcactgctcactgccgcctcaacctcctaggctcaagtgattctcccacctcggcctcccaagtagctgggactaccagtgcacaccactaactacccctggctaatttttaatttttttttttgtagagatagcatttcaccgtgttgcccaggctggtctccaactcctgggctcaagagatccacccacctcagcctccagattttatatatttcaaagtgcctagtactgtgctgggcacatacctgttcatttattacctggtaggtcgcactgggtgttcagagaacaaaaaagagccctctcatgggtcaactacagtcactcagcggagggaggcttgtgtctctcaatcaggctgatactgacagactttctcttcaatcaggctgatactgacagactttctctttccccgtaggagtgcccagtcccagggtgacactggacaagaaagaggccatccaaggtgggatcgtgagggtcaactgttctgtcccagaggaaaaggccccaatacacttcacaattgaaaaacttgaactaaatgaaaaaatggtcaagctgaaaagagagaagaattctcgagaccagaattttgtgatactggaattccccgttgaggaacaggaccgcgttttatccttccgatgtcaagctaggatcatttctgggatccatatgcagacctcagaatctaccaagagtgaactggtcaccgtgacgggtcagcatcctgctcccttcctcatcgttctttgtggtttctggtttggtatggggagaaagaacccagaactgggaaggggctgctgttctcaggacttaagacctgttcttaatcattttaagccagtatttttcaagcttttttgactgttatacagttaaattgcatacaatttttcagacaagagtttcaccaacaacactttactcttaatatatatgatgctttttgtttgtttggcttggtttttggggtttttttttttgagacagagtctcgctctgtcgcccaagctggagtgcagtggtgcaatcttggctcagtgcagcctctgcctcccgggttcaagcaattcttatgcctcagcctctggagtagctgggattacaggcatgcagcaccacacctgactaatttttgtatctttagtagagatggggtttcgtcatgttggccaggctggtctcaaactcctgatgtcaggcgatccacccgccttggcctcccaaagtgctgggattacaggcgtgagccaccaccccaaccttgtgtgtgtttttgagacagggtcttgctctgttgcctgagctggagtgcagtggcatgatttcagctcactgcaacctccgcctcccaggttcaagcgattctcctgcctcagcctcctgggtagctgggattacaggggcatgccaccatgcctggctaaatttgtatttttagtatagacagggttttaccatgttggccaggctggtctcaaactcctaacctcagatgatctacccacctcggcctcctaaagtgctaggattacaggcgtgagccaccgtgcccagcctatttcagtctttaaacactggccatgacacactacactgatgcattatgtgatctgtagtttggaagccactgctttaagccatcgagggtcagacaccaggaagttgggtttggaggggatcgggaggaaagaggggccaggtcctcagccttggcctcctgttgttcaacgtagatttgcgttggacaaacagcaaacaaatgaggtggcctgggaaatgctcccaggagagaaggaggcaacagcagagggaagctggggagtgtccaggacatacagggctctaggacaggtagtcagccactcccaggacccggtctcatttgccaagccgggagaagtcaggggaaggcacacccatgtagatatttgcaaatatttccaaaataggaaacttacattttgtcataaatggtccccttcttttggcatcccactttatcctgcccattgtgtgtatgtgtgtctgtatgttctattatctgattataaaatcatgtgtgctctgggtagaattttcagacaaaagagcaggatataaagtatgtatataaagtgacaatcatttataatgcctctacttagagaaaaccacacatgatcctctagactttttctacatatatttatatatcatatacacacccagccacacacacacacacacacacacacagaaaaaacatcttttgtttttacaaaagatggggacctatcacactattttacagctttttaaaaaccagacaaaatcttatggacttttgtccatatgaagaaatatagatctatctcattttagaactcagaacttgactgtagggatgggccatctctgcaaccctcaaactcctgggcttgagtgatttacctcatcttctgctgatggatatttaggtatttttctcagtgtttgctattacaacaatcctgcagtatagatatttgtacttgtaacttgtgtactttggcaactattttactattattatttatgtggttaattcttagtagtcaaattgttgaatcagatgttttgtgcattttcttttttatttatttatttatttatttatttatttatttatttatttatttgagacagagtttcactcttgttgcccaggctcgagtacagtggcgcaatctcagctcaccgcaacctccgcctcccgggttcaagcgattctcctgcctcagcctcccgagtagttgggattaggcatgtgccaccacgcctggctaattttgtatttttagttgagatggggtttctccatgttggtcaggctggtcttgactcccgatctcaggtgatccacctgcnnnnnnnnnnnnnnnnnnnnnnnnnnnnnnnnnnnnnnnnnnnnnnnnnnnnnnnnnnnnnnnnnnnnnnnnnnnnnnnnnnnnnnnnnnnnnnnnnnnnnnnnnnnnatcaggagtttgagaccagcctggccagcatggtgaaacctcatctctactaaaaatacaaaaattagccaagcgtggtggtgggcacctgtagtcccagctactctggaggctgaggcaggaggatcacttgaacctggaaggtggaggttgcagtgagccaccgtgtcactgcattccagcctgggtgactgagtgagactccatctcaaaacaacaacaaaaacttcagtatgaaaaacttatcgtaaaataaaaagacaaatgacaaactggagaaaatatttgcatagtacctttaacaaacagctaattcctttaatttataaaaggtttggctgactgtgcctggctcgatgttgccaaagtgctagatattgccaaagtgctcttcaagatggttgaacattttcatcagtagtgatgctagtgtttgttttcccacatccttaccaacaaactttttctttctttctttcttttttaaatagagattagggtcttgctatgttgaccaggctgttctcgaactcctggcctcaagtgatcctcccatctcggcctcccaaagtgctaggattgcaggcatgagccactgtgcctggtcctaacagagtatttcaatgttttattatttttgacaatctagttgaggtatagtgatatatatcattgttgtggtgatttgtatttctttagtttttagtgaggttgagtttgtttattcatctattacatttttttcccgtaaaccacctattcatatatgccttgtcattttcattgtgaatcacaaaactccagtgccacaaagaaacaagataggtaaatttgactaaagtcatttttattgttcctggttggatttgttcaagccctttattttatttatttatttatttttgagatggagtctcactctgtcgcccaggctggagtgcagtggcgcgatctcggctcactgcaacctccgcccaccaggttcaagtgattctcctgcctcagcctcctgagtagctggcattacagggggctgccaccacgcccagctaatttttgtatttttagtagagacggggtttcaccatcttggccaggctggtcttaaactcctgacctcgtgatccacccaccttggcctctcaaagtgctgggattacaggtgtggagcaccgtgcctgacccctttattttattttaaaaaatattttataatatgttttttgagatggagggtctcaccattgtttcccaggctggtcttaaactccttagctcaggcagttctcctgcctcagcctcccaaagtgctggagttgcaggcgtgagccaccgcccctagctgagcctttaataaattgattagctatttgtcagtgatattatgcaaatattttctctagtttgtcatttttctttgagttttttgataagttttccatgctgaagtttttaatcttcatttagtcaaatttacctgttctgtttctttatggcgcctcagttttgtgattcatacttaaaggtcttctgcatgtcaagattattaaaggaaaaaaacacacccatgttttctattcctgtgctatggtttcatttttttccctctgcatttaaatatctggtgcatctggaggtgatttgggtgaaagaaaaacacccttcagctattattaaggttccccagaagacctaaaatttgagagtcctaaagcatgtaaaggatgccttccccttttttacttttatttgagaaggcaggctattattttatgataacttctaattatgaattgactttataatgttaaaaatcactaatgaatattaaagcattagnnnnnnnnnnnnnnnnnnnnactaatgaatattaaagcattagagtactctaagttcactattagcattttaaagatatccctaatctatattttacacagttggaatctgtgtatatattccagtttatgccctgggcttgtttttttgttgtaagtggaaacgaaagcctaggacctatccctacttccctgaagatcctatgccctggttggtatgtgatctatacttgattaaaactatttttctttttaaatagagatagggtctcactatgttgcccagaggctgttctagaactcctgggcttcctaagtgttaggattacaggtgtaaggccccacactcaggcaaaattgtttttcaaactgcatgagtcatgaaatcagtttagtgagtgatggccagcattttaaaaaatgaaatagaaaagactagaagccacttttttggaggcatgcgattatttaaatattcatttccatgaagcagcacgtttcacagagctgaacttttgaaagctatagtatcttcatgctgaaatgccaagcttccatgaagtgctgagaatagcctagaaaactcgtagtgggcaggaggaagatcatttctaaatactgtggttatttctgaagtcctctgaaggcgagatctagagaaggtgtttggcctttgggaagcttcagaaacccagagaattgcagtgaagaagcctgaagatgcaagagtgagcgagaagggagggagtatgagagcagccaaggcaaaagttctagagaagaaaggttgaatttttaaagttagttaggaacaatagaagtttgaaaaggggaagcagcaaaaagagcagaagaggctcctcttgcccaggtttgcacctgagtccaaccaggttgtcttcctctcttgcagaatccttctctacacccaagttccacatcagccccaccggaatgatcatggaaggagctcagctccacattaagtgcaccattcaagtgactcacctggcccaggagtttccagaaatcataattcagaaggacaaggcgattgtggcccacaacagacatggcaacaaggctgtgtactcagtcatggccatggtggagcacagtggcaactacacgtgcaaagtggagtccagccgcatatccaaggtcagcagcatcgtggtcaacataacaggtagggctgctgctgcgggagggtgttggcatatggcgggctcaagaggccaccatgctgcaatccagcatggccaaagagagctgatacatttcctgcccctgcttatctgaatgaatgtgctcagatggggctttggtgctcgtgggaagaaaccactgcagagcgagttaacagtctactgtgcgtgttgagggtgcaggctccggcaccaaagctcaaccctgccgctcactgcttctgtgaccttgggtgagttattgaacgtgccgcagcgctgtgagatggtgataatgaccttttaggactgctataatgattaatgagataactatactgtaagcatgagctgagagatttgtacagagtaagactctgaacactggttaatgttttcattactctgttatatttctccatcccctgtgacaagcactatgctagatcccagacgtgggtcctatgacagggccacaaatgagaaagcattagtaaactcaaaaataatgataacatggctgggcatggtggctcacgtctgtaannnnnnnnnnnnnnnnnnnnnnnnnnnnnnnnnnnnnnnnnnnnnnnnnnnnnnnnnnnnnnnnnnnnnnnnnnnnnnnnnnnnnnnnnnnnnnnnnnnnnnnnnnnnnnnnnnnnnnnnnnnnnnnnnnnnnnnnnnnnnnnnnnnnnnnnnnnnnnnnnnnnnnnnnnnnnnnnnnnnnnnnnnnnnnnnnnnnnnnnnnnnnnnnnnnnnnnnnnnnnnnnnnnnnnnnnnnnaaaaaaaaaaagaaatgacaattaccctttgttgaacattgcatgatgggtttatatacattttcttttctttttttttttttcttttttgagacaaagtctcactctgttgcccaggctggagtgcagtggcacgatctcggcccactacaacctctgcctcccaggttcaagtaattctcctgcctcagcctcccgagtagctgggattacaggtgcatgcgccaccatgccctgctaactttttgtattttaagtagagatggggtttcaccatgctgtccaggctggtctcaaactcctaacctcaagtgatctgcctgcctcggcctcctaaagtgctgggattataggcatgagccactgggctggcccaggtttatatatattttcatttcatgctcataacaattcaaggagataggcataagaatgtccactttatggatgtggaaactgagactgtgaggttagtaactcaaccaaggattacagggttaccaagggggtagaacaagagtcaccctcaggcctgtttggctttcaaatccatgaacttgaaagttccctcagactcctaaccctccttacctggctttatttccctctaaagtacttagcaccaaaaatatactctacctttcttgtttattatgtgtatgcagccactagaatgcaagccgctgagaacaggaacattattttgttcagtgctatatccttaacacctagaacagtgcccggcacacaggaggaattcaatacatatttgttggatgaaggaatgagtgttagatgacaatgtttcaggggacagagacagtcagcacttcttggttgcacggtgaaggggttctcatgtgtctgcattcataacgttcattcattcatttgttcagttatttactaaaagcctcctatgtgtcaagcattgagtgtgcagtgtcagcaacagtctccagcaccataggtaggctaccaactacccaactggtatattggcatatacattgggtcctgctggtctatagtgtgtgctagcaatttagttaagtattgatcatgacttatattttgatggctcatggtatttttttactgatacaatttatattatctcattaaagaaaagtaccagttcaacacatattgagcattttctgtatgctgggcaacttactggggataaagagctacctaagacccggttttacctatgaagaattcatagacataactagaccagtctacagcattttgtggtagaagcccagatggactgagacattctgtctcagatactttccctggataactttctccaacaggcctttccatgattcccaaggctaggttcagtgtcttttttcttttcttttttttttttttttgagatggagttttgctcttgttgcccaggctgcagtgaagtggcactatctcagctcactgcaacctccgcctcccgggttcaagcgattctcctgcctcagcctcccgagtagctgggattataggcatgcaccaccacacctagataatttttgtatttttagtagagacggggtttcgccatgttggccgggcttgtcttgaactcctgacattgtgatccgtccacctcggcctcccaaaatgctgggattacaggtgtgagccaccacgccctgccagttcagtgtttttcctatggggtctgtgacaaataatgcatctgaatcaaccactaaatgtaagcactttgaagtcagagactgtttcttattcactgctatctctcagtgcctagcaaggggcccgccacagagagaacctgcaataaatacttgtggggtgaaatgagtgagtgaacaaatacatgagtgaatgcatgaatcattatttgctgcattacaagctgcaaaacttttcttttgttgcttttttttttttttttgaaatggagtttcagtctctttttttattattattatactttaagttttagggtacatgtgcacaatgtgcaggttagttacatatgtatacatgtgccatgctggtgtaccgcacccattaactcgtcatttagcattaggtatatctcctaatgctatccctcccccctccccccaccccactacagtccccagagtgtgatgttccccttcctgtgtccatgtgttctcattgttcaattcccacctatgagtgagaagatgcggtgtttggttttttgtccttgctatagtttactgagaatgatgatttccaatttcatccatgtccctacaaaggacatgaactcatcgttttttatggctgcatagtattccatggtgtatatgtgccacattttcttaatctggtctatcattgttggacatttggattggttccaagtctttgctattgtgaatagtgccacaataaacatacgtgtgcatgtgtctttatagcagcatgatttatagtcctttgggtatatacccagtaatgggatggctgggtcaaatggtatttctagttctagatccccgaggaatcgccacactgacttccacaatggttgaactagtttacagtcccaccaacagtgtaaaagtgttcctgtttctccacatcctctccagcacctgttgtttcctgactttttaatgatcgccattctaactggtgtgagatggtatctcatagcggttttgatttgcatttctctgatggccagtgatggtgagcattttttcatgtgttttttggctgcataaatgtcttcttttgagaagtgtctgttcatgtccttcgcccactttttgatggggttgtttgtttttttcttgtaaatttgtttgagttcattgtagattctggatattagccctttgtcagatgagtaggttgcaaaaattttctcccattttgtaggttgcctgttcactctgatggtagtttcttttgctgtgcagaaactctttagtttaattagagcccatttgtcaattttggcttttgttgccattgcttttggtgttttagacatgaagtccttgcccatgcctatgtcctgaatggtaatgcctaggttttcttctagggtttttatggttttaggtctaatgtttaagtctttaatccatcttgaattaatttttgtataaggtgtaaggaagggatccagtttcagctttctacatgtggctagccagttttcccagcaccatttattaaatagggaatcctttccccattgcttgtttttctcaggtttgtcaaagatcagatagttgtagatatgcggcgttattcctgagggctctgttccgttccattgatctatatctctgttttggtaccagtaccatgctgttttggttactgtagccttgtagtatagtttgaagtcaggttgcgtgatgtctccagctttgttcttttggcttaggattgacttggcgatgcgggctcttttttggttccatatgaactttaaagtagttttttccaattctgtgaagaaagtcattggtagcttgatggggatggcattgaatctataaattaccttgggcagtatggccattttcacgatattgattcttcctacccatgaccatggaatgttcttccatttgtttgtatcctcttttatttcattgagcagtggtttgtagttttccttgaagaggtccttcatgtcccttgtaagttggattcctaggtgttttattctctttgaagcaattgtgaatgggagttcactcatgatttggctctctgtttgtctgttattggtgtataagaatgcttgtgatttttgtacattgattttgtatcctgagactttgctgaagttgcttatcagcttaaggagattttgggctgagacaatggggttttctagatatccaatcatgtcatctgcaaacagggacaatttgacttcctcttttcctaattgaataccctttatttccttctcctgcctaattgccctggccagaacttccaacactatgttgaataggagtggtgagagaaggcatccctgtcttgtgccagttttcaaagggaatgcttccagtttttgcccattcagtatgatattggctgtgggtttgtcatagatagctcttattattttgagatacgtcccatcaatacctaatttattgagagtttttatcatgaagggttgttgaattttgtcaaaggccttttctgcgtctattgagataatcatgtggtttttgtctttggttctgtttatatgctggattacatttattgatttgcgtatattgaaccagccttgcatcccagggatgaagcccacttgatcatggtggataagctttttgatgtgctgctggatttggtttgccagtattttattgaggatttttgcatcaatgttcatcaaggatattggtctaaaattctcttttttggttgtatctctgcccggctttggtatcaggatgatgctggcctcatcatcctgagggaggattccctctttttctattgactggaatagtttcagaaggaatggtgccagttcctccttgtacctctggtagaattcggctgtgaatccatctggtcctggactctttttggttggtaagctattgattattgccacaatttcagatcccgttattggtctattcagagattcgacttcttcctggtttagtcttgggagagtgtgtgtgttgaggaatttatccatttctcctagattttctagtttatttgtgtagaggtgtttgtagtattctctgatggtagtttgtatttctgtgggatcggtgatgatatcccctttatcattttttattgcgtgtatttgattcttctctctttttttctttattaggcttgctagcggtctatcaattttgttgatcctttcaaaaaaccagctcctggattcattaattttttgaagggttttttgtgtctctatttccttcagttctgctctgattttagttatttcttgccttctgctagcttaaggagtttcattcttgttgcccaggctggagtgcagtggagcaatctcggctcactgcaatctctgtctcctgggttcaagggattctcttgcctcagcctcccgagtatctgggattacaggcgcccaccaccatgctggctaattttatatttttagtagagatggggtttcaccatgttgcccaggctggtctcaactcctgacctcaggtgatccacccacctctgcctcccaaagtgctgggattacaggcatgagccaccacacctggccacaagttgcaaaacttttctaatccttgtcattgaaataaattggattaacaagaaaggaaaacctgccattggaatcctaggcaaagaatgaaccctagctccttactggggtgatcgttaggtacatgagaagcaaaggaaaactttttgctggaagttggaagttggttctgccaagagcacctgagccaagggcctctccaggaagggtctttagggtggtggccagacacatctcgctccattcccactcactgtttttcagaactattttccaagcccgaactggaatcttccttcacacatctggaccaaggtgaaagactgaacctgtcctgctccatcccaggagcacctccagccaacttcaccatccagaaggaagatacgattgtgtcacagactcaagatttcaccaagatagcctcaaagtcggacagtgggacgtatatctgcactgcaggtattgacaaagtggtcaagaaaagcaacacagtccagatagtcgtatgtggtgagtatattgttgctgactcagaggacatccggggttgaatgggagaaaggaaatttatctgcagctgccgccctctccggtctgagcagactcaggcagggtaagaactagagggagagaagtgcgaaatcaaaggccaaagaaacaaggaggtattcctgctcagaacactgattcactgatgatgatgtggcctctgacttgctaagattctggcaagattctgcctcctggagcaagtacccacccaaaagttcaggaaggaaacactacttagtcaatgttaaacttttcttttttttttttgagacgtgtcgcccaggctagagtgcagtggcacgatagctcactgcaacctctgcctcctaggttcaagtgatctcctgcctcagcctcccaagtagctgggattacaggtgcccaccaccacgtctgcctaatttttgtatttttatttttattacttttatttatttatttatttatttttttgagatgcagtctcgctctgtcacccaggctggagtgcagtggcacaatctgggctcactgcaagctccgcctcctgggttcacgccattctcctgcctcagcctcccaagtagctgggactacaggcacccgcaaccacgcccggataatatttttttgtatttttagtagagatggggtttcaccgtgttagccaggatggtctccatctcctgacctcgtgatctgcctgcctcggcctcccaaagtcctgggattacaggcctgagccaccacacccggccaagaatatcaaaattccattttttaaatctgtatcctggctaacccaaaagggtcagacttccagtggacagaatgtaggtatttgaccaccaggagctgggcttctcaggcctgaatgtgcatgcaagacctggttaaaatacaggttatgattcagtattttaggcccagatggggccaggttctgcatctctaactagcattttggtgatgtggatgctgttggtctctggaccacactttgggtggcgagattctggttgattatagaactccagtcaagttgtcactgtcactatattattcagtcacgatcctttcatttaacctgtggctgtgttttatccagctaagattttattatagcttcaactgaaccaggattttagcctatttttaatgctctaaccacctaactcaaaaggcaggaatgcaagagacaaatgtgtgttataacgttttattttattttttgttcttgggaggaggaaatctcattgtataaggtttaaataaactaatgcctaaataatgacctaatataattcttatctgttaagaggctgaagcactaagaagactttttttatctttttttttttttttttttttttgagatggagttttgctcttgttacccaggctggagtgcaatgacatgatctcggctcactgcaacctctgcctcccgggttcaagcgattctcctgcctcagcctcccgagtagctaggattacaggcatgtgccaccatgcccagctaattttggatttnnnnnnnnnnnnnnnnnnnnnnnnnnnnnnnnnnnnnnnnnnnnnnnnnnnnnnnnnnnnnnnnnnnnnnnnnnnnnnnnnnnnnnnnnnnnnnnnnnnnnnnnnnnnnnnnnnnnnnnnnnnnnnnnnnnnnnnnnnnnnnnnnnnnnnnntattggctggacctggtggctcacacctgtaatcccaacaatttggcaggccaaggtgggtggatcacctgaggtcaggagtttgaggccagcctggccaacatggtgaaaccccctctctactaaaaatacaaaagttagccgggtgtggtggcacatgcctgtaatcccagctactcgggaggctgaggcaggagaatcccttggacccaggaggtggaggttgtggtcagctgagattgcgccattgcactccagcctgggtgacagagcaagactcggtctcagaacacacacacacacacacacacacacacacacacatatatgctcagccaggtgtggtggctcatacttataatcccagcactttgggcagctgatgtgggaggatcacttgagtccaggagttcaagaccagcctgagcacatagtgagaccctgtctctacaaaaaataaagaattagccaggtgtggtgtgcacctatagtcccagctactcgggaggctgaggtaggaggattgcttgattctgggaggttgtagtgagctgtcatcgcaccagtgcactccagcctgggtaatagagtgagaccctgtctcaaatacacacacacacacacacacacacacacacacacacattttgttggctacttgttgtactttttctatgttttctgtgtctttgctcaacacaagaaaagtatattatgtgtgcatgtgcgtgtgagatatggtaaaatatgaacatgtatttctggggatgtaatgttttccttgaatttctgtcattctctgttttgcttattgtacttctctttccctttcccttctcaccacacacacacacacacacacacacacacacacacacacacacagcctgtcagtctcataggtgtcctataaaggtaaataaggcaggcaggcatttgaaattacagcagggatagaaagcaaagctcaggctttggaggaggaacctcttgtgctggatgctttgcttttaccttcagtgccttttggattgtttctccctctgttctagaaatgctctcccagcccaggatttcttatgatgcccagtttgaggtcataaaaggacagaccatcgaagtccgttgcgaatcgatcagtggaactttgcctatttcttaccaacttttaaaaacaagtaaagttttggagaatagtaccaagaactcaaatgatcctgcggtattcaaagacaaccccactgaagacgtcgaataccagtgtgttgcagataattgccattcccacgccaaaatgttaagtgaggttctgagggtgaaggtgataggtaagttgctgtgctgtgagaagaaatcatgtgggcttggggcattctttcacccccagggactgtggggacaataagagaagtagggggccaggtgcggtggctcatgcctgtaatcccagcactttaggaggccaaggccggtgaatcattgaggccaggagttcaagaccagcctggccaacatggtgaaaccccatctctactaaaaatacaaaaattagctgggcatggtggcgtgcgcctataatcccagccactcgggaggctgaggcaggagaattgcttgaacccaggaagcagaggttgcactgagccaagttgcgccattgcactccagcctgagcaacaagagcgaaactccatctaaaaaaaaaaaagcgagagaagtagtgggtgcttatgcaaagtccatatactagatatgcaccaaagcagggccaaggttcagtaaaggaggctggaaaatatttgggggctattgatgaggacaatgtaatctctttccagaacctttcaacaaactgctaaaatatgataagcatgaaagtgtcctgactgcaggaagcactgaagttgtgcatatgggctcccttagcactttctccttttcagatacactgttctgagaattgtagatcaggactctgctgttgtgactcctagccgggcaaccctgccttgtgtgaattctgcagcagtgagagctacaggctgtggtctcatggcagttactaacatttgcctgggattctcatcatactcaagagaaatataccattgtcttgggggtggacagtttcccttaagcctctatctcatgcctctcagaaggcctcaggagtgccattgcttgcatgtcttagatattttgcatcctgttgtaaaaagtttaataaggcttcctcctctttgtccttcttgtttagtaactgcctatctacatgggctgctggtggatgtgaataggagagagggattcctgcttctattcatgtatagtctaatagtagccataccttttcaattaacattaacataggctggttgaggtagctcacacctgtaatcctagcgctttgggaagctgaggtgggcggatcacctgaggtcaggaattcgagaccagcctggccaacatggtgaaatcctgtctctaataaaaatacaaaaaattagctgggtgtggtggtgggcacctttaatgccagctactcgggaggctgaggcacaagaatcatttgaacctgggaggcagaggctgcagtgagccaatatcattccgctacactccagcctgggcaacggagcaagactccatctcaaaaaaaaaaaaaattaacattaacatagactaagcacctaatggtgtgaggcatacaaaaaagaagacatattctttgtttcaatgctgtggtaagaaacacaagctctcctaattaaatgatggagaaacatctgaatcataataccaataagcatagaaaaaatgttaggggtcatgtttggttgtcacgtgaactatatccttacagtgatggtgatagtaatttagggtatgccagacttcatctagcttaagtgggtaaacattgtgaaaaagctgggctaggtgccagggcttgagaatgggtgggcagagaaggctgaagatggctgaacatctccagcaaacacatgagccaaaaggtcccatggggcacttcaaaagactgtgcgcagccaggtgcggtggctcacgcctataatcccagcactttgggagaccgaatggggtggatcacttgagcccaggagtttgagactagcttggccaacatggcaaaaccccgtctctactaaaaatacaaaaattagcccagcgtggtggtgggtgcctgtagccccagctactcaggtggctgaggtgggagaatcacttgaatccaggaggcagaggttgcagtgagccaagatcgtgccactgcactccagcctgggtgacagagtgagactctatctcaaaaaaaaaaaaaaaaaaaaaaaaaaaagactgtggccaaatcagatggctggaaacaaaggctggagtttgggaatggagaatcaccggatatgagctgaaaaagtggctgagcctaagcgtgacaggtgtcaggtgccagtctcaggagtaggcaattgtcctgcatgcagtgaaaagccagaagatggaaggaaggacaggatgcaaatgagttctcggaacgatccacctggtggctgggtcagggagcaggcatggtgacttcagacctcatggtacgttagaggctaatgtgaagcccatgtgaagctgttggtttaaactgggtcgatatcagtggctcacatttactgaccatgtgtccagccctgtgtgaagtactgtagtaaattgctccaatggaaactcacaataaccacagaaggccagtaacagcattgtcgttattttatcatgacgcaactgaggcttagggcagacagctggtgggtggtgggactgggatttgagcccactggtgtcccaggcccggagcttggcttcttccattgtcttaccacagcctgcactcacaggagagtgactcataagttacaataccatctgctgaccatctgctctcacactagaaggaaagtctacttgggaagacaatttaggatccgaattttggtagttgaggatggagctaggaaaagcggatacaggaggtagccaagttctgcttggacctgcagggagtgaggctggccgggctccaggtggaaatgcccaggtgaaaagggagacttggagttcaggaaagtaacctggactggagccataggtttaggtgtcagtggctcagagacagaagctcagcgtgtaggtgaaatcacccaggaggagaatggggatggaaaactgaggattgaattttgcaaaatgttcatacttccggggaaaacaaagaataaccagtgaataagaaaggggtgccaggtaagaagggaagagaatcagagtcatgaggaagcccagaagcccagaaaaagctgagttccacagtaagacctgggcaacagtgaagtatggagagcccaagattgggagcgtggaggaagagcatccaccactgaatttaatcagcaggggactcagggacgttggttggggaatcaagtgaccttcccagtttcttcaaaacttgagagagagtgcagtgtcacaagattgtgactacaaaagagtgcagtcagatttcaggggtaacaagaaagtgtgaaataagggagtcaaagcataaaggaaaaaggagaaaaaatggccgatagctagagaaggcagtgggtcaagattgtctgtggcctggcatggtggcttatgcctgtaatcccagcattttggaaggccgaggtgggcaaatcacctgaggtcaggaattcaagaccagcctggccaacagggcaaaaccccgtctctaaaacaacaacaacaacaaaaaaatccaaagagttagctgggcctggtgggcgcacctgtcattccagctactcgggaggctgaggcaggagatttgcttgaacccaggaggcacacgttgcggtaagctgagattataccactgcactccagcctgggtgataagagcgggactctgtctcagaggaaaaaaaaaaaagttgagcagtggctgtctcatgttcctcttcctctgcccttctttgctcagtgtgaatccttttcctgcttttcagccccggtggatgaggtccagatttctatcctgtcaagtaaggtggtggagtctggagaggacattgtgctgcaatgtgctgtgaatgaaggatctggtcccatcacctataagttttacagagaaaaagagggcaaacccttctatcaaatgacctcaaatgccacccaggcattttggaccaagcagaaggctaacaaggaacaggagggagagtattactgcacagccttcaacagagccaaccacgcctccagtgtccccagaagcaaaatactgacagtcagaggtgagtcagggtctccatagcaagctgtgctgtgggctcccaagggcaagaccagaaaacacaccccttgtaagagggagttgggggggagtctagcttatgtgactgaaggctaggagagtaatgtcctccaggctcttggttgcaagtgacagaaacccactcaaattaagtaaaaaagagaaatcgattattataaggaattgggagaatgtcacatcgttccaattacaaattgttggcagactcaccattgagtcatcttgggtcaaacatccaaccacagaccacctgtagccaaggggattgggtcacgcagaacagacatgattggggaacccacttatgtgggtgggggcggtttcctggagaggaagagggctgaaaacacatgccaaaaaggagtctactccacttgagccctggagttggagaccagcctgggcaacatggtgaaaccctgtctctacaaaaagtacaaaaataggctgggcgcagtggctcatacctgtaatcccagctactcgggaggctgagacatgagaatcacttgaacccaggaggtagaggttgcagtgagcagagcttgctccactgcactccagcctgggcaacagagcaagactctgcctcaaaaatcaaaccaacaaaaaatagctgtgtgtggtggtgtgctcctgtagtcccagctactcgggaggctgaggtggaaggattgctcaagcccaggaagttgaggctgcagtgagctgtcatcagcctctagcctgggtgacagagtgagaccctgtttcaaaaaagaaagaaaaagaaaagagtctaccccagcaaagctggtttgttccctccttgaggaccacagctgacctctatttgtagcagaaacaatcatttctgcaccagctctgagtgcagaacccctcagaggtagatggatgctaaggcaagctgccagttacaagagctgtgagaatcagactgacttttgttgcttaagcctgatattatttcttcctggcagaggaagagcctatatacaaaaaaaattttttgttttgttttgttttcagtcattcttgccccatggaagaaaggacttattgcagtggttatcatcggagtgatcattgctctcttgatcattgcggccaaatgttattttctgaggaaagccaagggtgagcatagttctttccttccatactgactggtcgtccttgccaggaaaccagccagggatgcgtggtgcttttctgacccctggattcagctaggcaaaaatgaaagctattattttcctcattgggcaaaccagaaaagataaatttggggggaaattacatctttgtgtggttagaagaagccatttctgtagatttgtccacacctagtcctgtaatgcgtgtagagtggggtgcaagcgtcttggagacacacaaacatgcgcataacacccacatgttgcacacacacattgaatgctttgtaattaacctggtggttgtgctgtgacttctaccctatgcttggggttagctaagtaagcccggctgagcagccaggaccacctgctgataaccaggaatcagagtcagctgtccaagactcaaggaaaagggcagagcatcagtaaatcctgcaaaaatttttttgtgggataaggtaggttcttttggagcctctggtgctgctgcccaggatgggaggggaagatggggtgaggaggggccctggtttttgtcaggaaagctgccacccatcaaggaagatagagcacaccctggcgttgatcttaggccagcttcgagttacaaacgcagggattgatttcgcctttactttttgtaattatctggaatcaaagagagtggtcaggcacggtggctcacacctgtaattccagcactttgggaggccaaggcaggcagatcacttgaggtcaggagttcaagactagccgggacaacatggtgaaacccccatctctactaaaaatacaaaaaattggccagacgtggtgatgggtgcctgtaattgcagctactcaggaggctgaggcaggagaatcacttgaacctgggaggcagaggttacagtgagcccagatcacatcactgcactccagcctgggcaacagagcaagactctgtctcaaaaaaaaaaaaaaaagagagagagaggaagagagctgcctgcttatctggctaatctggttcccatatcattgtctctttttccatcatatttcactaacaaaaatcacttctggctaaaatagtcaagatatcatgtttctggggaaatatcttggtataagaccaagagaatacctctttcttttctgtcttttgtaaaagagtgaatatatttggcttctttttctctctttttctgggtattcaatcttctgggaagtcaaacgtagctgaaaagagtgttccttcacagcttactaggagtaaaacaaaaagaaaagaaaagtgttttctatctattaggttagtgcaaaagccattggcgttttggccattatagtggtatggatgtgggtactgtatactgactttggtttttcgttttctgttttaaagccaagcagatgccagtggaaatgtccaggtgagtgtatttgtaagaagggggcggctgctctgtgagcacggtggacatgtctggagggagattctggtcattaggaagttttcagtggctcttggcaaacttagaaaaatataggccttccttgagtgtgagttgtgtgtgtgagttgtgtgtgtgtgtgtgtgtgtgtgtgtatctccgtggaagaatgccaattgtcctttcatgggaaggaatggcttttattctgagatcatgtccttcctacatgattatttgtgaaatctccctttctttatgaaattataatggtagtagataaattttttaaaatttgacaaaatagagttggcctttaaaaaatggttttactacctttactgttgttgaaatcccaaatccaaaagtatagaaatgattgctctgttccagagagaaacagtagcgtgggataagaatttcaggggcttggtagtagcctgtgaaggactcctggtattcatgtgtgctttggtcctgatgtttattttaataggaaaaagttttatcaccgccaagcatggtggctcgcacctgtaatcccagcactttgggaggctgaggcaggcagatcacctgaggtcaggagttcaagaccagcctagccagcgaaaccccatctctactaaaaacacaaaaattagccgggcgtggtggtgcatgcctgtaatcccagctactcgggaggctgaggcacgagaatcacttgaacccaggaggcggaggctgcagtgatccgagattgcactgctgcactccagcctgggtgacagagcgagactctgtctaaaaaaaaaaaaagtttttttacataatccttggagctgccaaaaaatatttgttttcccaaatgagagagtaaagttttccttaccttggaaaactcttcctggttttctcatgatcttcccttgtttactttggtggtttggggttagaacaataacaacaacaaatatatctatatattgttttctgtttttatatttcattttaaggccagcagtaccacttctgaactccaacaacgagaaaatgtcagatcccaatatggaagctaacagtcattacggtaaagtcatgttctcctgccatttctaatttcccccaacttgctacatacttccttagccctctcagaagcagaatatgtaagtggtgggattacagttggaagagaaaccctggcttcaacagggtacttcatctcatcagccactgggccatgtaatatacggaaacgtaaaaggaaaggtaacatattttattctaactttgccaccttccaaactccccgtagaagaaagatggagaataatcataatgccttcaaagactttgaacattgctccagcgtaatattataattctccattttcaagacagagaccagatattgaatgaaaacattggtaaaacatcttctcagatggaattattacaagcacaagacagttttacttcaaatttgccacaaagggaaagcaatttcaatattctctcagtaaaggcataaataaagtgttccaactaagaaatatctattcataaggctcatcagtagcttcagggtcagctcagctgaatgagtagccagtcctaggagttcttaatcccaggttagtaagaaaattgctcaagcatttcagcagggatgctacttacttcccagagggggctataattacatcacaaaaagtcctgtcccagaccaaatttggaacactcttcctcttttctttctttcttttttttttagacagggtcttcccaggctggagtgcagtggtgcaatctcagctcactgcagcctctacctcccaggctcaggtgatcctcccatctcagcctcctgagtagctgggatcacaggcatgtgccaccatgcccagctaatttttattttttgtagagatggcactctaccaatgctggtttcagactcctgggcttaagaaatccttctgccttggcctcccaaagtgctgggattacaggtgtgagcccctgagcccagccacttttcttgctttatcagcaggtttggtcatagaatgctcatgttcttttctaattctataaatgtctcacaaaataagaaatttttaggatatactttttacagagacatattttgcttgagaaatatgttttaagaattgagtaattcatatagtactgaatcataaactttaaaaaaggaaaataaaatatttgtagtaataaaagtaatgtgtcagtaaatagaaacgagcaaatatattgtttaagaaactatattctaggctgggcgcggtggctcacgcctgtaatctcaacactttgggaggccgaggtaggtggatcacttgaggtcagcagttcaaaaccaccctggccaacatggtgtaaccctgtttctactaaaaatacaaaaaattagctgggcatggtggtacatgtttataatcccagctactcagcaggctgaggcaggagaatcccttgaacctgggaggtggaggttgcagtgacctgagatctcaacattgcactccagcctgagcaacaagagcgaaactccatctcaaaaaagaaagaaagaaagaaactatattcaggccaggcatggtagttcatgcctataatcccagctctttgggaggctgaggtgggaggatcacttgaggccaggagttggagaccagcctgtgcaacaaagcgagactaggagaatcgctggaatctgggaggaggaggctgcagtgagctgggatcgcaccactgcactccagcctgggtgacagagcaagacattgcctcaaaaaaaaaaaaaaaagaaagaaagaaaaaaagaaaaagactacacagcaggtcaaatggagcccacaggagggccaacgaggggacccaggacccagagacagtgctggttgtcactacactgaataaatcaggcttgactttgttaggggtactgaatttttaaaaggttttagaaaactagaatttcccttgtcactcaccctaattgttatttttcaactaggtcacaatgacgatgtcggaaaccatgcaatgaaaccaataaatgataataaaggtaattatctaattacatgtttttattagaaccaacttttacattaaaaaaaagactcataggaaaagaaaactaaaacttgaaggactgtggataatttcccacctctcttaatgaccctgtacccagccgatgtgtcaatgaaggtagctagctgctttcaccagagatgctatctagtgtcctcagtgggaaagtcacctaaatcaaagtagggaagaactgggttatactcaaaaaacaacttcctgactcataatgagctactgggtaaggcagtgggacctcttttttcttgagcattgaggtggtgatttttaaagacaatggacaataaattgctctcttctgcctgaagcactgagggattggactaaatcatttttcaaaattcctttcgctctgggctgctgccatgggagctaaggctcctaacaaagagaaaggattctgttaaggtctcttcctttctttcttttttttgtttttttcttgagacaagagtctcgctctgtcagccaggctggagtgcagtggtgcgatctcggctcactgcaacctccacctcccgggttcaagcaattctcctgcctcagcttcccaagtaactgggactacaggcgcctgccaccacgcccggctaatttttgtatttttactagagacagggtttcactgtgttggccaggctggtctcaaactcctgaccttgttatctgcccaccttggcctcccaaaatgctagaattacaggcgcgagccactgcgcctggctcttttttttttttttttttttttttgatacagagtcttactctgtcacccaagctggagtacggtggcacaatcttggctcactgcagcctccgcctctcgggttcaagccattctcgtgcctcagcctcccaagtagctgggattacaggtgtgtgccaccatgcccagctaatttttgtatttttagtattggtggatttttaccatgttggccaggctgatctcgaactcctgacctcaggtgatctgcccgcctcagcctcccgaagtnnnnnnnnnnnnnnnnnnnnnnnnnnnnnnnnnnnnnnnnnnnnnnnnnnnnnnnnnnnnnnnnnnnnnnnnnnnnnnnnnnnnnnnnnnnnnnnnnnnnnnnnnnnnnnnnnnnnnnnnnnnnnnnnnnnnnnnnnnnnnnnnnnnnnnnnnnnnnnnnnnnnnnnnnnnnnnnnnnnnnnnnnnnnnnnnnnnnnnnnnnnnnnnnnnnnnnnnnnnnnnnnnnnnnnnnnnnnnnnnntgaaatgtatctttgactgcagaatcattgttttggtagctgatgagaatccctattctttagggctttaaaaacaaaacagtaatgttatttttgacttgaagacaaactacttttctagctttcaccttagtaccctgagtgatttcattcacgtgtatgcctcacactctccaagtatttttagggtagtgacccctgttccccatttcccgaaatcctctcagtcttggaggtagctttgtttgcctgtggctgtggagaaggcttccagcatcttgagtgagactgaattgggagaactgctggggctgatactgggctgttttctgtctctactgacctgttccaagtccccccactgtagaaacagggacctaggccagagggtccctccacatcctggtaacagaggagtcagggaggaaaccatgggccccgaggccctgtatctgcctctgggaccagtgcggggttcgtactcccttcctcatcccgaatggaattaagcctgtgtctggctgccccctcaaaatacagaatactttaataacctgaatgaaaatctagccgggggcagtggcttatgcctgtaatcccagcactttgggaggctgaggtgggcggatcgcttgaggtcaggagttcaaaaccagcctggccaatatggtgaaaccctgtctctactaaaaatacaaaaattaaccccgtctctactaaaaatacaaaaattagctgggcatggtggtgcacacctgtaatcccagctactcaggaggcttaggcaggagaatcacttgaacccgggaggtggaggttgcagtgagctgagatcacaccactgcactccagcctgggtgaaagagtgagactctgtctcaaaaaaaaaaaaaaaaaagaaaagaaagtctctacttctatgatctgaggtgcccacaagagattccacctaaacaacaagctgctgtggtttctttgagcagagcctctgaactcagacgtgcagtacacggaagttcaagtgtcctcagctgagtctcacaaaggtaagtgccactcgagtgagtccccaggcattgcctttggcttgggtttaaaccccagtggtggcgggggtgctgtgttcagtgagaagagtctgtgcaccctcagtcgctccaaaggaagtgattagcagacctaccggcctgctaagactggaaggagcaaaggcccctggccctggccctgtctctgagctgtaaaatttcaataatttaaaagaaaaaaagaaaaggccaggcactgtggctcacacctgtaatcctagcactttgggaggccaaggcgggtggatcacctgagatcaggagttcgagaccagcctgaccaacatgataaaaccccatctctactaaaaatacaaaaattagccggctctggtggcgcacacctgtaatcccagctactcaggaggctgaggcaggagaatcgcttgaacccggaaggcagaggtggcagtgagctgagattgcgccactgcattccagcctgggtgacagagtgagactccatctcaaaaaatatatatatatatataaaatatataatatatataatatataaatataaatacatatataatatataatatatgttttctttgtgtataatatatattttataatattttatatatttttattttttatttttatatattttatatataatatttttatatttatattatttatatattttttattttatatatatatatattttttttttttctttgttgagacggagtctcactctctgcccaggctggagtgcagttgcgaggatcccgtcgacctgcaggggggggggggcgctgaggtctgnnnnnnnnnnnnnnnnnnnnnnnnnnnnnnnnnnnnnnnnnnnctcactgcaacctctgcctccgggttaaagcgattctcctgcctcagcctcccgagtagctgggattacaggcatgcaccgccacagccgggtaatttatttattttttttttgtatttttagtagagatgggatttcaccatgttggccagcgtgaactcgaacttctgacttcaaaagatccacccccctcagcctcccaaagtgctgggattacaggtgtgagccaccacactcggcctcaataattttaaaaattaattaaagaaaaatagagacagggtttcgccatgttgccctggctggtctcaaattcccgggctcaagcaatctgcccacttttgtctcccaaagtgctgggattacaggcgaagccaccacacctggccatttttgataattattcgttatgatactactaataataggtaagatttattgagcacttactaagtgccagggaattaggaagtactgagcaatttgtcccttccagaggtagaccccctgccaaacccagtgtgttcctaaagttgcttgtgcagactgaatgtgtgtcaatcaaatgcatgtttcaagatatcgagtgctttgccatttagagggacacttaggtaaaggcttttgaaagcacaagatccctgtccgtgtgagcagtggcactgattttacaccttgggttttgtttttgtgtatgtggttctctcaagggcaggctggcctggaagtccctgtctctggttctatgctggggaaatggatgcagagtgggctgctccatagaaaatgctagaacatcaatctcgtttgttttgggcaccataaaaaacatgcatctcctggccaggcacggtggctcacacttgtaaacctagtactttgggaggccaaggcaggtggatcacttgaggccaggagttcgagaccagcctggccaacatggtgaaaccctgtcttccactaaaaatacaaaaattagctgggcgtggtggcgcatgcctgtaatccatctactggggaggctgaggcagaagaatcgcttgaacccgggaggcagaggttgcagtgagccaggatcaagccactgctctccagcctggatggcagagcaagactccgtctaaaaaaaaattaaaaatgcatctcctaactgtcctcctcctttgcgaacccagattgggcagtacacagtccccgggggtcactgcacactcctgcacgctcaaaggaaacagtggctcctgcacgctcaaaggaagcagtctcagaaccttcctgcccagctgggaagctccctgggatcattgccatctgtctcccttcctctgaggctaaccccaggctgcatccacctagccaggcaggcctggggtagttttcctgactgtgcaggctgaatgggtgcagttttccaggccgtgccagccactagccagaccacatggcaatggggtcctgaaatcaccccttgctccatgatctgggaggagtcttggacttctccttgtcttctctttttgagcctgggctgagtgtcagcagctgtatgcacagaactttccttacagggatgccccgtagagccgctgggctgtgtgctgcaccactggggcacattcccatagcctaccaacagaatggcccccgggggttgtgtactgcccaatctgcacaactcacttccaagtctagactggacctgagaggggtggggaacgcggcaggcctgaagctctcttcctcattttttttttttttttttttttatgacagtcttgctcttgttgcccaggctggaatgcaatggcacagtttcggcacactgcttcctctgcttcccgggttcaagctattctcctgcctcagcctcctgagtagctggggttacaggcgcccaccaccatccccggctaatttttgtatttttagtagagacagggtttcaccatgttggccaggctggtctccaactcctgacctcaggtgatccacccgccttgaccacccaaagtgccgggattacaggtgtgaaccaccaggcctggcctcttcctctttatttcattgtagagtgattgactcgttgagataacaaattgtgattaaggccctacgcaggcagcacaagcacatacagaccctcccttgtggagggacagcctgagaggcagccaggaacacactgcagcaaagccctcctaaccttcagggatcacctaaccttcagtgatctgcccacctcagcctcccaaagtgctgggattacaagcatgagccactgcgcccggccctggttttctttttcttgctcaaaggtggggaagggttgaagggacaagaaggaggtattgtaatcccagcactttgggaggcagaggcgagaggatcacttgagcccaggcattcaagaccagcctgtgcaacaaagcaagaacttatttctacaaaaaatttaaaaataaggaggtatcgagaccctccaggattgggtgaagcagaggcggtcagcatgtgccctccttgccaagctgtgcagctgcagggatgccatcacctaactggtccctctttccccatttgcacaaaagctgtgtgggctgcagaggtccaggtagacccgtaaagagggtcacttgggggcaatggagagctttttgggaattcaatttgagttttctagacccgtcctcctccttggcagctaaggagcagtgtgggaagtcaggcctgagcctcaggtgttccctctctgccttcctgtgggtggagagccaggtattaccaggtacgaaaaggggctttgtgggtacaaggccagtggtgagtacatttgacctggtcttgaccaagccagttccctgctctcaagacttcctcctcctatggaggaggggttgggaaccacatccagctctgaccctagtggcagccgaccaagtggtcacttggggtggaggaggggcaggaaggaactcagtaaatcctggtttgctgcatgtttgctctgagactaattgctgggaaaaccccatgacgttgaagccatctccttctctgttaacacagagaaaaacagaagccaaaataaagccccatccggaaacatccctgacagcagagacaaagagcctgccagcctggtttactcattagcaagcagctgctgccgtggagtgggtggggaggagaggtagtgatgagctgcaactctgcctgcccacccatcacttaactgggcagatttgggggcagctgcaactctagaagctccaccaagaagcagaaacccccaggcccaaacaccaagccctctccctccatttattcctcacctgccccagcccccactgtgggcctgggtcggagggtgagctggccgtgaccaccccaccatgcgcctggtatatggtgtttgatagcatttgttgcagtgtctgcgttgtttgtgcacctgtctgcctcacagcctggagctcctgaaagctgggaccaggcccgatcacctttcctcttccacagtgcggggttcacactaggtgtctaggattctgctgagtgagtgatttggccaggcctgacatcaagcagagggtgtcttggggatgtggaggatcccccaatagggttggggatccctacagcttcccttgaggcccccacatctggtgccacagaaagagagtgaggggtgtgtgggcatctctgctgtcccagcagtgtggtgccctggtagctcagccactctactgagttccaaatcctgtttggtgccctggggaagtcagtgtaaggccctagtcaccccaaatgccccaagttcaactgtagggatctgacccacccccaggctttctcctcacaaatggttcctgacacaggagccaccaccattactgtcacttcaaacttggacaggtgcccccaggcagctgagcaagcctaggaatgggacatgtccaagaccccagctgtcaccccataggaggtcggggtctgccagggagacggacttgggaacaagtcacatcggtgtgttgtggacaaatgtcaccaacatgctgtggagctcagggggccctgtaacttcccagggcacagagggagagtgagtgtgggtgtgttggtacatgcgtgaagctccaccagggtcgtggggaaatggggcaaggagaaagggcagtgctggctgtggaggagtgtgtgtggggccaggaagtgagagtggggtgtccctggagcatggtgagacaagggcatctcagtgcaggtagagtccagggtcacaccccagccattcactccaaggagggaaatgcactgaccatggcacaggaagccccttaccctatctggggcttcctttccccatctgtaaaaggagaacagtggcccacacgacatcaggctcttttctacagtgaggcttcctgggcctttgtgcaggtgacaggagctgggaagtggccaggttccatcctgtttcctcagggttggtgggtatgtatgtgtgtgcacaccctgtgtgcatgagtgtgtgcacacccagattgcatgtttgtacatacagtgtgtatacaatgtgtgtagacacatcctatacactgtatgagggtatacatagcatgtatacacattgtgtgcatgagtgtgcgtgtgtatatgctgtgtgtgtatttttgtatacacatcctgtgcccataccccagtgtaaggtaaacagatggcaggaagggcgcccttgagtctcctccaggtatacgccacaccctgggtcagtcatcatgctgccatattgagagggtctagcccagaggatctcagccctgtctgcatattagggcccctgaggagatcctaaaaaaccagcaccagggacccccccagaccaatccaaccagaagctgcagtgaggcccaggagccagcagtgaaaacagccagcccagctgtctatctctgtaagagttctcagtcccagctattcctagggtcactgacaacccccaggctctaacccagacctcaggatcttgttctggatcccggggtctgggctctcaggtgattgggaggccatagcccaaccctgcgttgagggacctggcagaatgtctggacaagggtcacggtggcaggggaagaggagtggggccagcaagctggaggctgcaggcccttgctgggggcctctccatccgtggcccctcaggtccagggttcctctggtgcatgtggccctgctccacaatggcctgctgacctcctattcccagactgggagtgacgctcgttagaccaagaccttcttcttcttcttcttttttttttttttgaggtggtgtgtcactgtgttgcccaggctggagtgcagtggcgcaatcttggctcactgcaacctctgcatcctgggttcaagcgattctcgtcccttagctctcgagtaactgggatcacaggcacgcaccaccatgcccggctaattttttgaatttttagtagagacggggtttcgccatgttggccagaatggtctcaacctcctgacctcaagtgatctgcccccctcaccctcccaaagtgctgggattacaggtatgagccaccttgcccagccaggatcttctaacatcagaaatgacaaggtctctgggtgcttctggacctggttctggtggggtgcagtggtggggtacagccttgcctgcagagcctcagaccttttcctatgactgcagtggactgacctcgttcccagaggcagctactaacttatgcctggtcctttttccagatctaggaaagaaggacacagagacagtgtacagtgaagtccggaaagctgtccctggtgagtgagggtctccagtgccccagcctgggggatgccccctagaatcactgatggggccttgggagtgggcagagaaaagaagaagcaaagaaggccaaaaaaggggtgccacctcttacaccagcgctgtgggcttcctctctcccaccacccttaaaaagtcacctcgggtcacatttactattcatgtagtcaacgagcgcttcttgaatgcttactgaccccagccggtgacccttacctgctccccacacaggccctggtggctggggttccccaaggtcttggacgtcgagtgttttgctttggagacccccagtagcttcagcctttcttcttgttttcttttttctcttttttttttttggatatggagtctcgctctgtcactcaggctggagtgcagtggtgcaatctcgactcactgcaacctccacttcccggatttaagtgattctcctgcctcagcctcccaagtagatgggattacaggcgcccgccaccacactcagctaattttttttttttttttttgagacagagtttcgctcttgatgcccaggctggggtgcaatggagcgatctcggctcactgcaacctccgcctcccggttcaagcgattctcctgcctcagcctcctgagtagctggaattacaggcatgtgccaccacacccagctaattttgtatttttagtagagacggggtttctccctgttggtcaagctggtcgcaaactcccaacctcaggtaatccgcgcgcctcggcctcccaaagtgctgggattacaagtgtgagccaccgcgcccagcagcttcagcttttctgacagtagactgactttgggagtgggtgtgggtttgcggatctgctctatttcctttggttcggctggccccacttcgcttcccgtgacgacccactgcttactcatgaaagggcttcccccagagctgagcacagagcttaagcagacccggaactgggggagctcaacaagtcctttttttcggtgggggggtataataactgtattcaattctggtgaaatgaaatacacaatgacaacttttaaattctgaaggtaagtcagcaatccgaaagacgtaaacattgtgggggaaatagtgactgtgtgagtatctcgctttgtacagcagacctctatttaagtgggttcttggaaagggaatcattaaaatggtccaggacatttctgcaaagggtggctactcaggctaggcgtggtggctcattaagcactcagtaagtgctttatttatttattcaaaataaataaataaatataaaaggatgactcctccgagtacagtcggcaaaccagcagcagcaatctcgggcccagcccagacccacaaaactagtctctggaatctgaacttagccagcttcagatgtttctgatgctgccaatatttgagaagcactgtttgtgttttgttttgtttttttgtttgaaacagagtctcactctgtcacccagactggagtacagcagtgccatctcagctgactgcaactccgtgcaacaccccccggcccctaaggcttaagcgatcctcccaagtagctagaaccacagacacacaccaccatgcccagctaagtttttgtatttttggtagagatgaggttttaccatgttgcccagactggtcttgaattcctgagctcaagcaatccacccccttcggcctcccaaagtgctgggattacaagcgtgagccactgtgccaggcaaaaagcactgttttagaagaaccatccaattctctgaggaccctgctttttatctgaaatagcgatcacttcttaattcacttttaaaagttggtatatctacaagaagaatagaaactcaacccttgtggaacttgaccctgaataatttttgaaaaaccaattctctggggaatttttagctcaaatacctcatttcacaatctccatatattcagagctaacaaaatgcaaatctgacaataaacagccgttctctatttgtctagtgtaagggaaagttataagtgaggtagggttcaaggttgctcccattgtgcagttgtacaaaaatgccccttctactttcttggtggtccctgagagtgttcgctttcttggacactgctgaagagttcactttcagttgctttcgttaagcaaaatctcctatttgagcacttattgtatgtgctaagtggtctaagtacatcgtgtctttcaatgggatttgtccatgggattcaccacaaatcccattttacagttgaggatactaaggcatagagaggttaagacgcttgcccaagatcacgcagcaagccagcccctgagaatcgttcctccccggagtggactccacgctcttgatcactgaggtgtactgtcttcggtttgggaaagtcgggtggtagaaggtggaagctgcagggatcctcgctgcaggaggccagctccttaccacctctgcctcgaggcctccagcgaagtctgtgatcatctgaggctactggttggaggcccttttataggtggtgaggggcaccttagtgtggattctagggaaaaacttaactttttttcctttactctcctaagtgctctgactggggccctgcgaattggacaagcagattaacaagaggaaaacagagtttattaacatacataacgcaaatcacacaggagaaacatcaatgatgagtaactcaaaggggtggttagcacttggggtctataaagcatcttaggctgatcgcagtggctcacgcctgtaatcccagcactttgggaggccgaggcgggtggatcacctgaggtcaggagttggagaccagcctggccaatatggtgaaaccccgtctctactaaaaatacaaaaaattatctaggcatggtggcatgtacctgtaaccccagctcctcgggaggttgaggcaggagaattgcttgaacccgggaggcagaggttgcagtgagccgagatcacgctattgcactccagcctgggcaacaagaatgaaactccatctcaaaaaaataaaaataaatataaatatataaagcttcttaacaaagagcaataaatttgtagacaaatgacaagacaaaggaaggatggtttttggcttcccagagtggcaaactgagaaagtcaatcaagtggccacaaatattttatgggggcatttacagcaggtgtgttttcttaggagtttctgcttttagggctgggcatggtggttcatgcctgtaatctcagcactttggaaggctgaggtgagagaatcgcttgagcccaggaatttgagaccagcttgggcaacacagtgaggccccatctctaaaaaaaaaaaaaaaaaaaaaattttaaaaaatttaaaaaaccaatataaaaacaaaaattagctgggcatagtggtgcatgcctgtagtcccagctgctcaggagactgagacaggaggatcgcttgagcctgggaggtggaggctgcagtgaactgtgattgtgccactgccctccagcctgggtgacagaatgagactgtgggttccaaaaaacttaattttcttcctttactctcttaggttttctgactggggccctgcaaattacacaagacagattaacaagagaaaaacagagaccctctttgtttttctcttgttaatctgcctcaaaaaaaaaaaaaaaggaagaagtagtttctgcttttagtcagataaacaagctctgggaagacttccttctacatctgaaccagctcaaaacaatccttatgccaaaggggcatattttgtggtggcatattctgatttccttcatctgctttagggcagctggctgttcaagtgggttctctcggggtctccaggttggttctagattactcagtccgggctgttggaacctgacccctcaggcagaaactataggcatcgtagaacccactcttgtaggatttgaggcggtgtagagcacaggctttcctgggagacatcccagtccccgttctgaggcagcccccaatcagctgagttactgtgaccaagatgtcttacccctcagagactcagtttcttcaactgttaaatgcaaatggggttaaatgagatagaatcatgggagatggtgctggttatccccacagtcactgtattatccctgccacagagtgagcacttaatcaatttcagtttaaaaacacaggaggaacttgagccctatagagttcagtgtcttgcccagggtactactagagcagtcccctgactccgagaccaggaccctcccacagcaccacctgggccacctggagtcaatcagggctctgtcgctctacaaccttgtctctaaactggcagaccattagggaacctgccaggtctctaacctgcccaggggtgaaggtagagagagccctggttcttgcacaggctgtagcccttggggcctgcagctgcctgcagctgtgcctccaacccacctggaagcctctggtcctggaagccaaggggtttcctgtttgtcagtgcttccttgaggagaggagcctgcaggacatggctgatttcttttctttctctctttctctctctctctttctttctctctcgctctctctttttctttttcttcctttctttcctttttcctttctttccttttctctttcctccttctttctatctttctctctctctctctctccttccttccttctttcttttcttttctttcttttttgtaagacagagtctcactgtgtcacccaggctggagtgcagtggcacgatcacagtgaacagcagcctccacctcctgggctcaagcgatcctcccgcctcagcctctggagaagctgggattacaggcacgcaccaccatgcccagctaattcgccatgttgcccaggctattgcccaattcctgggctcaagtgatctgcccgccttggcctcccaaagtgctgggattcaggcgtgcgccacctgaatgctcagcttttctttcttttcctcttactggttgctaaagagcaggcatcccatttgaggaatttctctcctaaattctctgggacttccttaatagaaaacatcttccaagtaatctcttttccttcactccctacataaaatcagagagattccctcctctctgcctggggggagttagatgattctccaaagagccagatccttcagccagcagtaacccacccgcttaggcttctctcacactcatcctcagcctctctttgttcaagtcttccccagagcccagagctgttaaggatcatcatttctttctttctttctttcttttttttttttttgagacagggtcttcgctctgtcacccaggctggagtgcagtggcgcgatcgcagctcactgcaacctccagctcccgggttcaagtgattcttctgcctcagcctcctgagtagctgggaccacagctactgccaccacgcccgggtaattttttttgtatttttagtagagacggtgtttcaccatattggtcaggctgatctcgaactccagacctcaggtgatccacctgccttggcctcccaaagtgctgggataacaggtgtgagacaccacgcccggccagatcatcatttcttattcatcatcataaccatccccagattcttcatcattgccaaattcttcagcagctctttcctctggatattattccacctctgtagactgcagatttcttttgttccatgttgattgttttctccctatactctaattatcttgcggttgggcgggtcccttcctcctctgtcacagttaaagctaatatgtattgagcactccctctgtgtgagacacttggagccctaccttaatccccaagatcatctaacagttgatgggggttctattattattcttgctctgcatatggggaaacgggcccagaggttaactaatttgtccttgttccacagccagtggcagagcaaggactgaacccagggggcctggctgaagccatgctcttcaaagccttcctgttccctctctttttttctcttaattggtttgttaccaattgctgtccattgtttgttgccaaaccaattgactgcattcttttctgttttccatctttcttagtttaggcttcatgttatcggcataattggagaacttttgtctacttttttttttttcagacagggtctggctctgtcactcaggctggagtgcagtggcatgatcttggctcactgcaacctctgtcccccggcctcaagcatcctcccctctcagcctcctaagtagatcctatctactttaaacatgaagagtaatattctactgtggcctgggtgaccctgggcaagtcatagagcctctcaagaccttggtcaccttctctgtgagatgaggtatgggctggaggcaggtcagtggtcctcgggctttattaaaacatcaatagtttggcgcaccccactccctgtgaatttcccattcactaggtctggagcggtgccgaaaacgtgcatttctaacaggtgtccacacgcagctgctgccgtcacgctggggcccgggctttgagaaccactcttgatgcagcatgttcctttctgattgtgccacgctaaggctctgcttcttgttggaaggagtagggtctttctcaccctccagaaatcctggagggatctttcagcattggtgggcaggtaaaacccagaaacactgtgcttattagagggaaggtggtattgagtgacccccaataaaacagggggcccagggccgcgcgcagtggctcacgcctgtaatcccagcaatttgggaggctaaggcgggcggatcatgaggtcaggagatcgagaccatcctggctaacacggtgaaaccccatctctactaaaaatacaaaaaattagctggacgtggtggcgggcgcctgtagtccagctacatgggaggctgaggcaggagaatggtgtgaacccgggaggcagagcttgcagtgagccaagatcgcaccagtgcactccaggcctggcgacagagtgagactccatctcaaaaaaaaaaattggggcccagtgtggggtaggtttgtgagatcagtgagccagctgggtgcagagcggagtctttgctgacctttccccttcatgttccccgtcatcttctagcatgcagcatttcaggactgcctattttgggaaatggcttaaagggcacagttctggcccttaaaccccctttcaccccctgagtaatacaaaataagccctcccctagataagcaatagggcatggggcaggcctgcctccaaggagcagccccagggccgaggagagagagctgggcgctggcccaggggacttgagtttgatgggaaagcttgcagacagtgggggagctgcctggtctttccagtcttggcttttggctctaagcacagcttttttttttttttttttaattgttgtatcatgaggcgccttccactcagctgcctccccacgttaggggatggacacagcactggcagggatccctgtgtgtctcagtttccctattgactctctgtggcctagagatgtatggtagaattccacactatgctttttttccaccttttttttttttttttttttttttgagacagggtctctcctctgtcacccaggctggagtgcagtggnnnnnnnnnnnnnnnnnnnnnnnnnnnnnnnnnnncaacctccacctccccaggcaggcccctctgactcagctgggactacaggcatgcaccaccgcacccagcaaaatatttttgtattttagtagagatggggtttcgtcacattggccaggctggtcttgaactccagagctcaagcaatccgcccgcctcagcctcccaaagtgctgggattacaatgcccagcccacttttttttttactttttacaattttattcttaaaattgtggtaaaacacatatcacataaaatttaccattttaactctaagtatccagctcagtggcactaagtactacacttttggttgtcatagcgtggtgaacagagaagagaatgctactgcgtctcgtggagagaggccagggataccgctaaacatgcgacaatgcacaggacagccccctccccaccacaaaacaccacccagcccaaaatttcaacagggccaccatggagaaaccctggccagaggaattcacctcctgcaactcctccaacaggagagctggttttcctctccagtaccagcttttgcctgccctctgtcttgggaggtgacttaaggcacatcccacctgattactgtggctctggatgggtgctgagtcttgctctgggcaccagccctacctgttgagccagaggcccacctccccatcacggaatctactcactcaatggtccatcttctacttttttgttgctattttttgttttttgagactaagtcttgctctgtcactcaggctggagtgcaatagcacgatcttggttcactgcaacaatcgcctcctgggtccaagtgattctcatgcctcagccttccaagtagctgggattggaggcatgcaccaccacgcccagctaatttttgtatttttagtagagacggagtttcaccattgttggccaggctggtctcgaactcctggccacaagtgatccaccggccttggtctcccaaagttctgggatgacaggcgtgagccactgcgcccagtccaccttctactttctatttgcctggaattcagacttccagggtgtttcttagggaggcagaaaccctggtcctcaccgcatcccctgccacccagtataccaagactagctgggccgagagtagccgtgacaggaaatggctgagaaagaaccaaagaaaaggaggcctctgtgccaagtctcctatgggaggaagagaagagcacttgaggatcagtccccacccatcctgtgaggcccagagccagtgaggccagagggcactgccaaccctgcccctggggaggcatttcctacttcagcgtgcaagatggtgaaaaagtatccccatgaaaaaatggatgctacctccaattcaactttggtgatgattgctctgttaccaaaaaaacaagaactgcaagtgtgcatggagtaagtgttccatccgtatttgagtttttcacattttgtcttcagattgctttagaaaatgcctacttgaggttctttcgctgttgggagaggttccagagcccttaggggactaggagggtccaggaatcacggggtcctttgggtccttgcaggtcagatttgcattgggggtgctgtcctcaacctcactcaatgcatggaagttgacacaatggctcaacattagcgttgggctgattcatcatttggctgttgacaccagcctctggcccagccaggacagaaaaagggcccctgaggaacttctggctctgttccctctatgggggaggggcagtggacttgtgataagacagggtgttagggtgaggtggacttggggaaacaggatatttctaaattagagaaacagaaggattgtgacccccgctgtgacagacaggccctgagcctgcccgaggtccaggaggaactgtatgtgagcttggggctgggtctatactgaggccccttggcgtacttttctcgataagactgaggacttatggccctcccaccattccctccaccaccttcgagaacagcaaccatccccaatgcccacatctcctcttggggtctcccccaggcagcaggtgaggtccccatgacttctctgtcttcaagtcagggtccacagtcagctgtttggggatctgccccagcatgtgggccactgaccattgggtggggtcctggtcctttccagaagggcaagccatacccgtcacttgcctctcataggaaacaccatctctaatgaatgcaggcagggatcacccaccacctatgcagagcttcctgctctcattggcttttctcagcctcactgtcctcttgctgacatccggttgggaccatttgcgcaactgcagactggcagggccaggcaaacacagcatggcgcctgccaagaaggtggtgtgagactgggcacagtggctcatgcctgtaatcccagcactttgggagactgagatgagtggatcacctgaggtcaggagtttgagaccagcctggccaacatggcgaaaccccatctctactaaaaatacaaaaattacccggctattgtggtgggcatctgtaatcccagctacctgggaggctgaggcaggagaattgcttgaacccaggaaatggaggttgcagtgagccactgcactccagcctgggtgacagagctagaccccgtctcaaaaaaaaaaaaaaagaaggtggtgtgggctcccacacagttgagaggagactcctgaggggaaggggaaacagttgcccagatctgctaagagcgttggcaatgcttctgcctcctcctctgttgagcctgctcctggaagggattgacaaaatagtatgaaatctagaaatagctttattcccaaagaggataccggtggtgttattgaaaagagcaaaaacttggaaagcacctacatttttaaagtaaggaattggtgaagtcaatagttgtacatccatttaacaattatttagtagctaattggacaattatgcttaagaagttttcagaaaaagtttataaagccatgttatatgaaaaagttaagttataaaatggcatatactgtataattataactgctccccacccccaaaaaagccaaatcgtagtggaaaatgactaggaaaaaaaaaagtatcaacagggtttggagaatgaggccagatatcatttttatctgctacttcctactttccatagttttcatttttttcttaaaaaaatatgtgctactaatttttttttttttttgagatggagtcttgctgtgtcacccaggctggagtgcagtggcgcaatctcagctcactgcaacctctgcctcctgggttcaagcgattctcctgcctcagcctcccgagtaactgggactacaggtgcccaccaccacgcctggctaattttgtatttttagtagagatgggatttcaccatgttggccaggctggtctcctggcctcaggtgatccgcctgcctcagcctctccaactgttgggattacaggcatgagccaccacacccagccgtgatactacatttctaaaaaactgtttaaaatgttaaatgaggccagatgtggtgactcacacttgtaatcccagcactttgggaggccagggttggcagatcacctgaggccaggagttcgagaccaccctggccaacatggcaaaactccatttctacaaaaaatacaaaaaaaattagccaggcatggtggtgtgcgcctgtagtcccagcaacttgggaggctgaggcaggagaattccttgaatctgggaggcggagggtgcagtgagccgagatagtgccagctgaggcaggagaattccctggaggtagaggttacggtgagccaagatggcgccaccacactccagcctgagtgacaaagcgagactctgtctcaaaaaaaaaaaaataaagaaaattttaaatgaagtgccagggactttatgcgcatgtcatgtggagctagagggtcccggggaagctgtcttgcacaaaggagccataaacctctaagggcacctgccggctgatgtctcctggctctcgcctcctccctcttttctcgacctgctcctgaccctgtgatgttgttggggcagttgaactgggttatttgcgttgctcactgccatgtcatcctttgttttgtagatgccgtggaaagcagatactctgtaagtacacatttcatatacattatatttaaaagtactccactgaacagtgaaatatttccagactcacccacgtcctgcattcacacgaattcttccccgctccctagtctgtttcagaccagaagccctgggcttctctgactagccttggccagttctgatttcgaatattctctcctgcaatttccatcattacatctcagcccacacgtgaagggattgggactctggggtgcttagcgccaaacaagcaaagcacacatttcgtttaacgccaaagtctaggctctggaagtgaggcagatctagggtgtatgcttggaggagtggagcagctgacagctcattgcaatttagccgatactaattaccccctacacaccaggccatcagctgcaggagacacccaagcttcttgacctcagttcaccttctgatgagggaatcagacatgtgatcacttatcataaagcaaagtgagctatgccagagcctatgggaacacagaacagagacctagctagtggcctcttccccaaggaatcatttggaatgggccatgaagaatgaatggagtgatggcagcattgagggagaaagatcagcaggagcacaagggtgagggatgaccagtttcaagcagtgtgggatgggaaaagaagagtgtgacagtgacaagtgacgggagaaagataagtcagggcttaaatccaaaggatttacatgccttgttaagaagcttcattctgtaggaaatggagttaggaatctgctatttggcagatgggagggtttatgaaagacacagaggcccacgttcaacttttgcaaagacgtgtcttccaatcccaacctttttgtgagctacccagcaatgcaggagttaactgggcagctaatatctgaagaaatgaggcatttgccgcataaacttcttttaggtctgggaagaactttcagcaagatttctggtagctcttccagtgggcccctggcttcctttgttttgcccatgtctggactcttgtaaaacagagctcattatgcctttgacagacaggaagccactgacattctttttatggaagaaagctatgaatttaaggaaaagaggaatgaaatgaatggttgttttttttcctagccaaaacccactcagactcctgaaatcagagactatcgtgtcactgggacaaggagcccaatttacagatgaggaaactgaggcctgcactggtagaatagcgtgtctggggtcacctggatggctaatagagtgaggaacagagcccaggcctctatactctgcggccagtcctctgtcacgacagagactccctccaagatgtgaagttgctgtcccagcaataatggctttgagagagtggaaaatgaggtctttgctccctgggcagtgcgggacacagatgtgttctcctgaagcgataaacatggctgggtccacccaaaacaccctgtaggaccaacttatttactttgtcttggatccaaagggtgtctctggacaaaggcttggagctccaggccagacagaactttacccagaagctggcccttgggcctcaaagtctgctcccaggatggttctgagagctcacccatgactggtcctgtccccccagaaaaaagaatagagtcatttgatgggagcacagggtttccagccgttgggaaaggaattttgaacctttaagcaaatgggttttgtttataaaagaagcaggtatagcttccctaataatcagctggtgtgggtcaggagaaaattaattgaattgcccagtggggaaatgggaggagatttccttcctgaaatcaaacctggcgatcattcccagttgtttaatggccgttgcctctgaaaacattggaggaaatatcttaacaatgagatagccacgtagccaaagactaatttggtattgtttgacttgcttcaatggcacattctgacttcatttttcctctgccatttttaccttgtttataaattgtgtgtgtggccgacgcagacagatagcatggaagagaacaccctgtacttaaatgaaaggggtgaatctggacttgtgagagtcttgggatcttggaaaggaccctgccttcttacagaaagaaaggcaattggcagctatagctcgcctccccccttcctggaggccaggaggcagctgggctacagtggaaactgtccaggtgctaggatcaggggatgggaggggagctccagctttccagctgtcttttgggtgagcctgtcttcctcaagctcaagcttccttatctataaagtggagatggtgatgacaatgatgataagagcaacctattaggattttaaggatgaaatgagcaactgcaaccaccatataaaagctgcaagctgcaaaccaccatataaaagctggttgatctcaagctcttttcatcacttgggcaatagtaggtgtggatgggggacttaacttgatttggccatgaaatgaccctgccacatatggagaatgtagcagttgcttacccaaggcataggattcaaccaaggccaggctttgacttaggaatcagagacccacattaacacttgacttcccacttcttagccatgtcaccatgggcaaatttcttggcctctcaagacctctgcttcctaatctgtaaactgggaatcataaactccctcacttggttgttgcaagggttgaatgagcacctggcatagacctggtctattgcaagtgcccacaggagcactttgtagaagcaggaactagagatcccagggtgtgttgaaatcaaaatgacctttgagggagaccacaccatattccgggtacaaggcagggcgatttcacaactgcacttgggtggctgatggctggcttctgatttaagcacagcaagcccagaccttggatgtgagcgtgttaacctttacttcaaaatccctaaggccctgttgattgtggcccagcccttcctgtctgtggctttggttctgcaatggtgccccaggcattggctgcccccacagagagagagcggaggtgtctggggagggacttggtctggggcccacagaaaggctggacaccagagtcatgtctcccccatccaggcagagcagaggaaatagggcagggtggctgccggcgctggcaggcctccagcctctggggccagcacggcttgcttggcccacttgcatggggctctcctggcagaggaggggccagagccttggctttctagttggggcacctcggccctgcatcctgttccccaagggtccttggacccagcagggctgaaacaaaatggagacactatcccagctcaccctcaggaagccagccaggctggctgtggaggtcccaagaccctgggtcatcctccatctccagcttctgccttgctgagttccacctgcagcagagtgtcctgtgcacatggagggtccagaatagtggacttaggtgctgcctgctcttcagggcccactgttgcccagggcccccctctactctggtatctcccagcaggccctgctctttttccctccaagggctccttccatttgtcaaaatccaatctttaggctgactccagagttgcttctgtgaatcccccactgcccagcccagagccctctcagtgcctctgaaccccttctgcagtttgttgagacctcttataccttctacttcatagtggtgttgtttatcaataattgatacaatataaaattcttggggacagcttcttgcatccccagcatagagaacagtgtgggtcagataagggtccaggcactgataggtggataggtgacacaaataccatttgaagctgttaaagagcactacaggatggcagaaggaatccaggaatccttttgtgggtgtttttttgctttttttgtttgtttgtgtgttttttgagatgaagtctcactctatcacccaggctggagtgcaggggtgctatttcagctcactgcaacctccatctcccagactcaagtgatcctcccacctcagcctcctgagtagctgggactacaggtgcacaccaccatgtatgcctaattctttgcatttttgatagagatggggcttcgccatgttgcccaggctgttctggaactcctaaactcaggggatccacccaccttggcctcccaaagtgccgggattacagggatgagctaccatgcccagccaggaatccttttttttaattgtcataaaatatacataatattaagtttaccattttctttttttttgagacggagtcttgctctgtcacccaggttggagtgcagtggcgcaatcttggctcactgcaagctccgcctcccgggttcacgccattctcctgcctcagcctcccgagtggctgggactacaggcacacgccaccacgcccggctaatttttgtatttttcagtagagacaaggtttcactatgttggccaggctggtcttgaactcctgacctcatgatccacccgcctcggcctcccaaagtgttgggattacaggcgtgagccactgcgcccgcccggcaaattcaccattttccagtgtatacttaaccattttaaagtgtataattcagttgcattaggtccgttcacattgctgtgcaaccaccaccactatccatctccagagctttttctttttaagtgaaagcaagtttattagagaagtaaagaaacaaaagaatggctactccataggcagagcagccactgaaacactgtacccattaaacactaactccccattgcccctccagcaacccctagcaaccactgtctactttctgtctctatgaatttgactatttgaggtacatcacataagtggaatcatatatttgtcctttcatgtctgccttatttcatttagcataacgttttcaaggttttcctgtgttgaaaatatatcagaatttcattctctttttaaggtagaatcatatcattttaaaacatttcagttggaccatctaagttcagtccttcattttcaaaattaaaaaacaggcctcaaacgggtgcatctcacgttagctagagacagaactggagctagaagtcagatctcttacaaagttgcctttcttcttctgtgggtaagtggggcacccttgggacgctgtgctgggcgtacatgggtgcttgatgaagttacttggtggactgatgtgattgatgtccaacatgtatgcagggacagaggctatggtccctacagagcaggcatggagagaaggagaaatacatacgggcaggagccaggagagggagggtgtagtgagcagagaccgcgccactgcactccagcctgagtgacagagtgagaatccatctaaaaaaaattgcttgctaaagaagtggtctcctgaggtcttaagacgttcctgacaatgtcttgagtgggtgggagagaggctgcagtcattgtgctgtggaatttcagaggtgagaaccacacctaaccaaaattactttccctgtttgcctcagtgacacagctgcaggaaccctggtgggtgttgtattaagtaaatttgacctttattctttgcagatctgtgaaatgttgtcttctgaggggccacgtgtatctgtagtgctgaggactccttgggcctctgaagtcacagagagaaccctgcagggtgggggaccagtgtgtgacagccctgctttgcattttctttgagaagtgctgtcattttgcatttctctccaccagggcaatcttcaatcttgagaggtgtgatcataacttgccttgtttcttgtcgctacagagaacggaaggctcccttgatggaacttagacagcaaggccagatgcacatccctggaaggacatccatgttccgagaagaacagataatccctgtatttcaagacctctgtgcacttatttatgaacctgccctgctcccacagaacacagcaattcctcaggctaagctgccggttcttaaatccatcctgctaagttaatgttgggtagaaagagatacagaggggctgttgaatttcccacataccctccttccaccaagttggaacatccttggaaattggaagagcacaagaggagatccagggcaaggccattgggatattctgaaacttgaatattttgttttgtgcagagataaagaccttttccatgcaccctcatacacagaaaccaattttcttttttatactcaatcatttctagcgcatggcctggttagaggctggttttttctcttttcctttggtccttcaaaggcttgtagttttggctagtccttgttctttggaaatacacagtgctgaccagacagcctccccctgtcccctctatgacctcgccctccacaaatgggaaaaccagactacttgggagcaccgcctgtgaaataccaacctgaagacaccgttcattcaggcaacgcacaaaacagaaaatgaaggtggaacaagcacagatgttcttcaactgtttttgtctacactctttctcttttcctctaccatgctgaaggctgaaagacaggaagatggtgccatcagcaaatattattcttaattgaaaacttgaaatgtgtatgtttcttactaatttttaaaaatgtattccttgccagggcaggcaaggtggctcacgcctgtaatcccagcacttcaggaggctgaggtgggcggatcacctgaggtcaggagtttgagaccagcctgatgaaaccctgtctctactaaaaatacaagaattagccgggcgtggtggcgcatgcctgtagtatcagctactcaagaggctgaggtgagattatcgcttgaacccaggaaacggaggttgtagtgagcggagatcgcgccactgcactccagcctgagtgacagagtgagaatccatctcaaaaaaaacaaaaaacaaaattgcttgctaaagaagtggtctcctgaggtcttaagacattcctgacagtgtcttgagtgggtgggagagaggttgctgtcattgcgctgtggaatttcacagatgagaaccacgcctagccaaaatcacttttcctgtttgcctcagtgacacagctgcagggaccctcgtggatgttgtattaaataaatttgacctttgctctttgcagatctgtgaaatgttgtcttctgaggggccacatgcatctatagtgctgaggactccttgggcctctgaagtcacagagagaaccgagcaggtctatgtttttgttttgttgttttgagacggagattcgctcttgttgcccgggctggactgcagcggcgcaacctctgctcactgcaacctccgcctcctgggttcaagcagttctcctgtctcagcctcccgagtagctgggattacaggcacatgtcaccacgcctggctaatttttgtatttttagtagagatggggtttcaccacgttggccaggctgatctcgaatgcctgacctttggtgatctgcccgccttgtcctcatgtgtgctccacaggcctttgggttgggattgcaggcgtgagccaccatgcccagcctagactcttttgacaatatgatgaaagctgttggttcctttccccaacacacacacaccgagttgtatcacgaaaatgtcatacaatttccaggttttctgagtggtgggctcagattgaggtcaaaggatcagacgacctctaacgaccttcatgtctctgttgatgatctggggacagccagatcccctgtgtccagggagttccttagtcccttgccaccaccagagaagggcaattgccacgggagctgcaaagaccctattcctactcctggtgccttacttatgcagcacgactgaattttttgttttgttttgttttgttgagacaggggcttgctctgttgcccaggctggagtgcagtggcacaacaatggctcaccgcagcctcgaacccctgggctcaagcgatcctcccatctcagcttcctgggtagctgggaccagaggcgtgagccgccatagctggctaatttttaattttttttttgcagagatgaggtttcaccatggtgcccaggctggtctcgaacttctgggctcaagtgatcctccctccttggcctcgcaaagtgctgggattgcaggcatgagccaccgcccccggcctgtggagcacacatgagtttaaaattactttcccttctgcctatatttccgaggaggaaacttcatgcgcagggatctttcttagtggatttaatggctaaaaggtctgtctgaatccaggacgctggctttagccttcctcggcagctgccgtaaccccggtgtctaaacctgaagcatcccaggagcacccactccaggagttttctcggccgcggaactcattagttagagcgccctcttgtgttctcatgtggtaatcggtcattgaaggacttaaaatggtccttagccaacacacagtagaacttttccctcttctgaccccaagaggtcagccacccatttcatgagcatatactggtcgccccatcagcgttctctgattggctaactgaacccactccccgacctagactcaagacaggcgaagtgacgcttaggtcaacattcactcactaaagcaacgactgtcgggcgattttgtctcccgctggttttggaatggtgtctggagacatttttggttgtcacagctgggtgggtgtgctcccggcatctggtgggtagaaaccaagcatgctcctaaacatcctacaggcacagaaccgtctcccacgaccaagcatgatcaagtcccaaatgccaataatggccaggttgagaaactctgcacagaagcatccagttatttgtctgtttgctcaacaagcttgtgctcatcatgctctgtgttcctgacgctgtgctgggtgttggcggtgggaagattacaagagtcacatggcagctgtcctcctggaaggtacaacccagtagagatgcagactaacagagagccaattacaaagcagtgtgacaagcgtcatggtggaaaattaaaagctcaaacaagggcacatgggaggggcttccaacacagactttgggggatccaggaaggtctaagaggaaagtgggtctcaccaaagccttgaccataggcagagggtaccagtggaaaaggtggggtgaagaacattgaggacaaaaggaagaagtgcaggaaggccctgaggcaagggagtggggggtgccctggagggatggcagcagggcagtctgtcagacccaagtggcctccagccctagaagccaattagtcctcctcaaaaagctgtcactgtcccctaagaattgctgccaggctcccactggcctgactcagtctttgagagtcttaaggaggaggtctctgaaaggtacacaccaagaactctccccagcacagctgtttttaagactctccaccagcgtcattggcgtgttgggaagaaaccctctgccacagaggccagcttcagcctttgcctaacaccgcaagggcaaatggaaaggtaaacgggaaggagatgtctccccagcaggctatttgaggacagtcttccctgcagaagatctcaacctggggtcaacagagtggaaatgttagagtagggagctaggcaaacatgagcaggacaggtgagggcccccacaggaatgtcaggctaccatcaggtgatggtcaggtggttgttaaactgtctctgtaaaataataattggttgcagccagctccaagcaaggacagtctctcaatagatacaaaacaccctgatctggtgatcagccgcttcccgataagatctcaggagctgggcaagcagcctggagcatgcgcaccaagaggcaaaatggcggaatttaaccagtatatgacctaccttcctctgggaacgcacgactggtaaggggaaaaatgcctcaagtgagcatgcgcgcaacttcagtaatcacactgtgcatgcgaccccttccaagtgctggcaggtcaccacatacgcggacagcctgctgcaagggaagaatcaggggagatgagacgtaaatcccagaactatgccaaatacataaaaccccaagttaagggtcaggcagggcacttagatctctcaagttgcctgcctgacccaagtgtagtgtacttccttttgttcctgctctaaaactttttaataaactctcactcctgctctaaaacttgccttggtctctccctgtgccttaagaccacttaaaaccacctctgcccctcagctgagttctgtctttgagaaggcaagcatcaagtttgctgcagacccattggattcaccactggtaacagaagttggggtaaggcgtggggcctgagaattctctaagagtaggtgcagccgggcgcggtggctcacgcctgtaaccccagcactttgagaggctgaggtgggtggatcagctgaggtcaggagttcgagaccagcctcaatatggggaaaccccatctctactaaaaatacaaaatcagccgggcgtagtggtgcatgcctgtaatctcagctactcgggaggctgaggcaggagaattgcttgaacctgggaggcagaggttgtggtgagccaagatcgagccattgcactccagcctgggcaacaagagcgaaactctgtctcaaaaaaaaaaaaaaagagtaggtgcaaaaggttatgagggtgtgcagttttctatgggagagaatccatagcttttatccatgtctttgtttgttttgagataaagagtcttgctctgtcacgcaggctggagtgcactggtgtgaacatggctcactgcagccttgacctcccgggctcaagcaatcctcctgtctcagcttcccaaagctgggaccacaggtgcccacgaccacacccagctaatttttaatttttttgtagagatgagggtgttactatgttgcccaggctggtcacaaactcctgggctcaagtgatagaactcctgcctcagcctcccaaattctgggattataggtgtgagccactacgcctggccttttatcagtttcttgaagggagatagggtccaaaaaagggttaggaacttctaaataattaaaaactcacatatgcttcatattatttgatgtcagttaaaaccccaaaatagtgatcaatacatttcttaccaaaggatctactttaaagacagttttacattcaatatccccagcaagactcggcttaccttcagaaaattgctcagaataaggaaacaaatggtgatttcaacatttgaagggggtagccctcatctctcaaaagtaataagctattagaatgttttggaataccagaccaggtgcagtgactcatgcctgtaatcccagcacttagggaggcagaggcagaaggattgcttgagcccaggagtttaagtcctgcctgggcaatatagcaagaccccattctccacaaaaaagaaaaaaaaaaagacaaaaaagagaatattttggaatatcaaagaaccagcagtaaatctattgaaaaacttcagagtccaaagtatttctaaagcccaaattgtcccttcatatatatttcataattcaataggaaaagaattctttcttcagaatgaactttggcaatagaaaagaaaccttatttccacattcagaaaggatgacaatgctggaaagcaaattaactttttttaacttttttgcttgtttagtttttgagtctcgctcttgttgcccaggttggagtgcagtggcaccatcttggctcactgcaacctccgcctcccaggttcaagcaattctcctgcctcagcctcccaagtagctaggattacaggcatgtgccaccacacccggctaattttgtatttttttagtggagatggggtttcaccatattggtcaggctggtcaaactcctaacctcaagtgatccacccaccctggcctcccaaagtgctgggattacaggcatgagccaccacgcctggccgcaaatacaattcttaaagaaaaataaaagctaaattggaataggggattggccaccagtcgattacatgaccttggatgtgtcacacatcctagggctcctctcctgcaaaggaaaatgtattcatcatttcccagggatgccataataaattaccacaaaccagctggctaaaaacagcagaaatctattcttgcacagttctggacacctgaagtccaaaatcaaggtgtcagcaatgccatgctcctccaaaggctctaggaaagaccccttctctgcctctcctggcctctgatggttcctggcaattcttgagattttctgggttgcagctgcactgctccagtcactgcctctgtcatcacagggcattctttcacatgcgtgtctgtgccttcacatggccttctgagaaggacactagagctgggtgtggtggctcatgcctgtaatcctagcactttgggaggctgaggcgagtggatcacctgcggtcaggagttcaagaccagtctggccaacatggtgaaatcccatctctactaaaaatacaaaaaattagccaggcctggtggcacacacctgtaatcccagctactcaggaggctgaggcaggagaatggcgtgaatccgggaggcggaggttgcagtgagccaagattgcaccactgcactccagcctcggggatagagcgagactctgtctccaaaaaaaaaaggacactagttatcggatttagcgcccacccgaatccaatacaaccccatcttcactaacattatctacaaagaccctgtctccaaataaactcacattctgaagttccaagcagatatgattttggggtgacactattcaacccagtacagaaaagactggactagacgagctcaggtccttgtagctctgacttcccaggtttctaagatgctcatgtaaatcggaaggcagaaagatggtgattttccttcagataacatcatcttctcagcatcatcttttgagccttctcaggccagtgttctctcactgtgctctgttctcttgtgctttgtgtctcggcatctctgaaatattattgttttcttttctattttatttatttattatatggaaatgaggtctcactatgttacccaggctggtatcaagctcctgagctcaagcaatcctactgcctcggcctcccaacgtgctgggattacaggcatgagccaccatgcccggccttttttaaaattttttttgagacagagtcttgctctgtctcccaggctggagggcagtggcgcaatctcggctcactgcaacctctgcctcccaggttcaagtgattctcgtgcctcagcctcccgagtagctgggattacaggcgtgtgccaccacgcgcagctaatttttgtgtttttagtagagatggggtttcaccatattggccaggctggtctcgaactcctgacctcaggtgatcctctcgcctcagcctcacaaagtgctgggactacaggtgtgagccaccgcgcccggcctgttgttttctttctctggccttcttcagagttctccctcactctcctctctcattctttctctgcttcctcctttcccttcctttttctcctctagttcagtttttctctttgtctccctcccattaattggccagaatacataactaaagtttataaacttctcttttaaaatttagttgtatttattttagagacgaagtcttactttgttgcccaggctggagtgcagtagctgttcatatgtgtgatcatagcacactacagcctcaaactcctgggctcaaacaatcgtcttgagtagctgggactacaagcgcatgtcaaagcacctggcctgaagtttatatgtttcttgcatatcttgaagaattttatattcccagggttgttcttggttttgtttgttttttggtttttttgttttgttttgttctttgtttgtttgtttttgaaagccaatgcctggaatattttttacttttctctctttttagggaaaaaagcctccaaaagccttcaaagttgttttctatgtatatttgaccctcggtggattatttttccaaggatttattggactcattaggaaaaagtccccagttgctgccttacttcctcccaatcctaggatatgctcattttcctggaacctcttggcacaggagggtctggcatggtgccgggtgctgttccatcagtttctggtacaccaacacaccctcctcagggactggattgtttgggccagaatttgcagcatgaggaaatctcccagtctcctcccaagacttctacagagtctgggactggattctaggaaaggaaaaagagtggatttcagtgcctttcaacgacagaccctaaagcggaacctaacaccgtctctagaagcccatcacaccgccagccgttgattaaaagtgtgtatccctgggccaagacgagctcagtttgcagatggtgtctctggcagggttagtttaagatgaaaaagatagcaaattttaaaagttcttttcggctgggcacggcgcctcacgcctataatccagcactttgggaggctgaggcgggcagatcatttgaagtcaggagttcgagaccagcctgaccaacatagtgaaaccctgtctttactaaaaataaaaaataaaataaataaaaaaaattagctggggtgtggttgcgcacgcctgtaatctcagctacttgggggggctgaggcaggagaatcggttgaacccaggaggtgaaggttgcagtgagttaagatggcaccactgcattccagcctgggcaacagagtgagactctgtctcaaaaaaataaaaataaaaaacagactgggcacggtggctcatgcctgtaattctagcactttgagaggccaaggcaggcagatcacaaggtcaggagtttgagaccagcctgaccaacatggtaaaaccctgtctctactaaaaatacaaaaattagccaggcatggtggtgtgcacctgtaatcccagctactctggaggctgaggcaggagaattgcttcaacccaggaggaagaggttgcagtgagcccagatcgcaccactgcactccagcctgggcaacagagcgagactccgtctcaaaaaaataaaaaataaaaataaaaataaaaaaataaaaagttcttttcatcaggaagctcttgactacagtcatttcaatagacccttggcatttgcagattaaacacttgaggttttgattatttagagaatgaccacaatgatttagatttgaggcaggctgtccttccattgggcccctgtggcagggccatttgcagaattaatttgctgttaatctccctgggatccttcctgtccctgctgccacacagacctctagaaatcccagtttgtgtgtgcttctcaccccaggagaggttgtagagcaggaatgggcagaggtggagcagcagataataaagtgtccccaaaactagaaagagaaagctgcagggatccactctctgcctccaggtgatggagagtctgtcagggaaatggctgatgcctggggcacccaggaaggctagactacaggccctgggtacccagataggctggaccccaggccctgggtcttacagccttggcagagatcccatgcacctcatgtggccgggagccagtggaccacctgccttctgtggaccttggaagcctggacttcaaggagcttgaacagtgaccataaccagagtcccttccccttcctctgttttctaggaaccacaggagccttccagattcttgtgccaccctagagggaaggagggattttccaattgaggcaaacattaactttcccaatagtctggcagaatgggagctcagaggcagattctctttcatttaatgacagtgacataatgtgatgtttgtcgcaaaaccaagtttggagttgataagtcatgccctctatataaaacttttaatcatattctttgaggctggcaagcaggaatggatagcatagctggtgagtgagcctaaccagccactcagtagcctcatcttattgagtatatttgcaagaattttttttttttttttgacagagtctcgctctgtcgcccaggctggagtgcagcagtgcaatctcagctcactgcaacctctgcctctcaggttcaagcgattctcctgcctcaggctcccgaatagctgggattacaggcatgcaccaccatacccagctaatttttgtatttttagtagagacagggtttcaccatgttggccaggctggtctcaaactcctgaccttgtgatccgcctgcttcggcctctcagagtgctgggattacggacatgagccaccacgcccggcctgtttgcaagaaattcttaagtgcctattaagggtctagatcctgtgctatgtacaggggatacatcagagaaccagacagacatggtccctggagcttgcaaggctttgctcagagaagtcaggttttccggtcatgcctgtcaaggggaaagttgctagattgtgagatgtttgtaggaggcttccctttctagtgttacaggtctactcaggaagcggatccaacatctagaagaccctgtagtcattgcaaaagatcctcaagggcatgagggcgtattctttaccaatttacagtgctaaaaggacacttttgtccttttgcgagggtctttgcaatagtttttgtttgtttgtttgtttgttttttaagatggagtctcactctgtcacccaggctggagtgcagtggcacaatcttggctcactgcaacctccaccccccgggttcaagtgattctcctgcctcagcctcctgagtagctgggattataggcgcccaccaccacgcccagctaatttttgtatttttagtagagatggggttttaccatgttagccaggctggtcttgaactcctgacctcgtgatccacccgcctcggcctcccaaagtgctgggattataggcgtgaaccaccgcacctggcctcacatcaccatcttaaggttatgtgactgtgaggaccttagtccccgagtat

SEQ ID NO: 93 - DNA, 95468 bp, Homo sapiens
atttggtgctcagaaattgtacccaatattccaattacaggcttaatcactacagtgggcacagtgggagggcagtgccttccttcatcaggacagacctgtgcatctgtgtgtcctgcctgtgtgctcctgaccattcccgtgcattgcacctgtgttcaactaaaaccctttgccattgttcacctttaccaatgagtcctaccctcttcccaagtctttaacttatccccttgctaaataaaaatttctgaagttttttcttaatggtcatctttctaagttatttctggttcagctaatcttccagccctggcctaggacctgcccacattgaaacaaggctgacttgtgtgatcagtaaaatactgcagaaaaaataagacttttgaggctaggtcctaatacattgcaacttcagccttagtttcttggattacttcctctgggataagccaagaccacgttgtaagagttaagcagccctccacaaggagagacgccatcttgcttacactagttgccagccacatgagtgagccacctcagaggtggatcctccagcttcagtcccaggcaacatctggcttcaacctcttcagagacctgagccagaactgcccaaaagagctcttgaattcctgacccacagatacagagagatgcatactgttgttaagccacaaagttctggggtaattatgtagcagtaaatagctaatacagattttggcttgtaaattaagtgtgtgttgtctttttcatggttctttggcttgaccaaaggttaacattaagggtatgataatgggaacaggctgagcactgtgtctcctgtctataatcccagcactttgggaggattgcttgaggccaggagttcaagaccagcctgggcaacatagcgacatcctcatctctaaaaaaagagaaaattttaattagctgggcatggtggctcctgtttgtagtattcttcacatagatgaagaataaataagtggagaatatgcaactcccatgcagaagaattctaggtaatttacatcaatactctactgaggggtataactcccagtccttaagtgtggcctgtacacagtgacttgctttcaaagaggagagtatagaaatgggaataaaatagtaactacagtggagaaaactgacactttctcagccagatgatcaaggtcaacgtcaatagtgtcatgttgctaggaaatacctcaaaataggagaatggcactttacctttttggtcttctttccaaaaccctgtactctcagcttaatcatgagaaaaacatcagatataacctagccgaaggactttacaaaataccttcctactgtcaagatcatcaaaaagagaagcatgagaaactttcatgcctagaagggcctaaggagatgtagtgagtaaatgcagtgtggtgtcctggatagcatcctggaacaaaaaaaggacattaggtaaaaactaagaaaatctaaagtgtttagttaatatgtatcaatattggttcactaattgtaataaatgtaccatgctaatgtaaaatactaataaaaggggaaattaggtgtgatgtatcctcacaattttttctataaatctaaaactcagaaaataggccgggcgtggtggttcacacctgtaatcccagcactttgggaggccgaggtgggtggatcacctgaggtcaggagtccgagaccagcctggccaacatagtgaaaccccgtctctactaaaattacaaaaattagccaggtgtggtggtgtctgcctgtaattccagctacttgggaggctgaggcaggagaattgcttgaacctgggaggcagagcttgcagtgagctgagatcactccactgcacttcagcctgggcaacagagcaagactccatctcaagaaaaaaaaaaaattaaactattagaaaataaaaagcctattttaaaaagtatgtaaccacattcaagtatcatactaaaaggataagtcattttgaatatcaaatacccagtcacctttagatctctcccaatggctaattttttttttctttcagttttttgattgtgcaacccaagcctggtacatccattgcatttgattggcatgtctcaagtatcttcaacacctggtttctcctctttagatttttttcttgcagtcgattgactgaagatttttggtctcatagtttcccacgtgctgggctgtgcccttgcattcctgtgatgtcgtttaatttgtgcctctgctcctttcttacacattgatagccgtagttatgtaaatttttttagtttgatttgttgagaatttagaaaaaggttttgagacttccctccatgaggatgagttttccaatttcttcctgcaggtttataaatgttcacttcctatatatttgaggttaaaaacacggaccatgtttaaagttattattgcttttggttttgagttttctttaatgcattttgtgaacctttccctttgcgctcagcctatttgtattcaattattgatacatttgaggcctatttttactatcctgtaaagtttgacccacttttaattccttccttgacattgttttgaatgtacggttgtatttcccccctaataagctaaaagctttaactcccagtttctcccccatcacccctacctaccccaccccattccaaactcctgttgattcctggacttggggtcacattttcacttagcctattttttaagaccagactttctaaggtttgtgtttaccttcacttcatctatctattgcagtgcctccagtttctcctcttgtgttaactgtgtgcagtgtctgtgtgatgaagcttctgagatcttacatgtctaaggttttgttgttgttgttgttgttttgttttttgagacagattttcattcatgtggcccaggctggagtgcaatggcatgctctcagctcactgcaacctccacctcccaggttcaattgattctcctgcctcaacctcttgagtagctgggattataggtgcacgccaccacacccagctaatttttgtacttttagtagagatggggtttcagaatgttagccaggctggtctcgaactcctgacctcaagtgatctgcccgcctcggccttccaaagtgctgggattacaggcatgagccactgcacctggccaactaaggatatttttatcatgcttgtatatttgaattcattttggctatgcttacaattctgggttttaaattctttaatactttgaaaacactgtttggttttttattgcatccattgtttatttaaaatctgatgtcaatctggttcttgttccttgtcaggaaactttttttttgagacagagtcgttccctgttgccgatgcccaggctggagtgcagtggtgtgatctccactcaccacggcctctgcctccatggttcaagcgattctcatgcctcagcctcccgagtagctggggaccacaggtgtgcaccaccacacccggccaatttttgtatttttagtagagatgagggtttcaccatgttgtccaggctggtcttgaactcctggcctcaggtgatttacccgcctcagcctcccaaagtgctgggattacaggtgtgagccaccatgccttctcaggaaactaattttttcctgggtattttcaagcttctataatgtgtttaggtgtgggtgttatttgtatttccctttgttggcactctgggtttttcattctaggaaatttatttctgttctttgtgctaatatttcctctctcccatttcttctgttttttatccaaatgttagcatttctaagcaattcctatatctcttagcctttcttttatattttatatttcattttctttattcgtccctccaggagatttctttagtctggtcttctaattttctcatgaattcctacaatgtatccattctgctgtgtgtcctgtctattgagccctttatttcaggagttttatttttcccttcaaatatttctggttttcttttccaattgttggtatcatctttctagctttgttttactatttctacttctgttaggatctgtaatctagtatgttactattcttttaaagtctctttactcaagtgttgtggtatgttggcctgtgagctcattttccctgactaacattggctacccagcagcgtgtgcttgagacagcccagctgatgcactcctcgccagccccaaggggttcatgaaggacaggattgaatgaaccccggggaggagcacccaagcaataagagcaaccattcttcactctggaaaacgactcagtttagggctgtcaacagctcctttctcattttactgtctcacttccctgtgttatgccaaaaaaagcggtgtcctgccttaagccaaagtgccacccctcacatgcaagcttactcctgggttcctcatattttgctctgtgaggtggtgttttcctttatatgtactcaagttaatcttggtggaggtagccagtaaccaaggaagttgagcactttgggagggtctggcactggaaccccattaacatatatatgtctagtataattcaatcattcgaaacgtcaagagtggagtttcactggtgtttaagtgaaatgcataatgatcttatgtctgttgtttccagcagaaggacagaagatccataatgtaacaacgtcctgaccaatactgagtgtatttctattgggggatcccctgggcacagggagaaaacagtccatgaaagggatcctccattcttcctcccgttgccttgccctttgacacctgcttctctccaggccacctttctaaagcccagcctatgtcccttcctcagagcacagaaccctgcaggtctttaagctcgcagtgctttccattcatggacatttttataccttatttttgccaaacactgtgccaggcacaaatttatctttaaaagaaattgtaatgaagtaggcatatagaaaagtgcatgaaacttttaccatttaaagtataatttttatgcaaacacctgtgtcaccaccaaccaggtcaagaaggagattttgctagaaggcccccacattcctgtgcttgattacggctccatctttccctcgaggaaattgtctttgtgcctcttaggataatcagtaccttgttttgccagtcagtaggtgggcaatcttgggcacatagcttaaccctcttggagtttgattcttctgtaaaatggggatggattcactcctccaaaaggctgaatagcttctggctgaaagcacatattctggtgctagtctatcaggttcgagtcccagttctcctacttacaagctatgtgatgtttagtgattcacattgcctttcccgcactttcaatttgtagaatgagatgagaacaatactgacgtcttagagttgctctgaagagcaaatgagacaaaatattgcgggcacttaaaataccacctgagtcacgataaatactgtttcaaaaagatgctgattattcttttcataatgcttttgtgtatatggaagcataggaactagtggaagataacctatggaaattactatgaaaaatgatgtctatttatggataattttgtttcaggttccaaattggtagccacaaagtttctgagttccttcagccttcatctactcttaccccacatctcttcctcatgaaggagcaaaaattagattttctataactgaagtggcattttttaagataaaatttatgtaacgtaaaattcaccatcttaaccattttaaagcgtattgttcagcagttttcagtatattcacacaattgtgcaacaatcaccattatctagttccataaaattttcatcaccccaaaagttaactcttagccatcactgtccatttccccttcgccccagcccctggcaaccataaatctaccttttgtttctatggatttgcccattctggacattttgcctaaattggatcacataatatgtgctctttcgtgtctggcttcaacttagcataatattttaaaggtttatattgcagcatgtacattccttttatggtcagatatttcattatatggatataccacattctgttgatccattcattagtcgatggacattgggttgtttccgtgtttggctactatgaatgatgctgctatgaacatctgtgtgcaagtttttgtgtgaacatatgttttctgttctctcgagtatatatctaggaatggaactgtgaagtcgtatggtaactgtttaacgttttgaagagctgccaggctgtttcccacagcagccgcaccgttttacatttccaccagcgatgaatgagggttccagttgctccaccatcgccgtacatttttgagtcaaaaatagctttccagcacttggctcagcatcttacatctgaagctgaattacagagatgggcatgtttcattgtaaagtcttgtccagcagtctcctggcaaaggcagtgcttcattctagaatgaaatggccatttacaaagtaccaagttgcaaagggcccaatgggagactccttggcctttgatgtatcttgcctaagggagcctgctctgctgggtagcttcagggcacttgacgccagccccagtccatcattctgggctggctgcctcgtacagcttcaaccaatgctagtttcaatcctttgggggctccacatgagctgttttagagataaatttggctcctgagattgttaaaacctgtatgtctctaaagagtaagtaaaaaggaattcaaggaaatgtaaaacatgctttaatatctcatacctgactctactgaggaatgttaaaaaaggaatttcccatttgggactttcggctgaagccctgtttctcttgctcttttattacatcttttcttcatttgtaatttatataggtttctgtttgcaattcaagttgaatcttttattttaatgaggatatggagtgagacgatgtgataatgaaaacaacgtgcatttcaagtattttgaaaaaacttccttagtttctgcaaggtcatctttgtgtttcttctgctttatcagccttaatggtaatctttaaatgtttccaaacatgggaagtcccaacagcggtctttttttttttttcttaagagttgaattgtctcccttgaaaatgggattttttaattgtaacctgccacattccctatcacagtaatgggaacttactaaataggaagcaatttgagcacttaaatgtgctgatgtgatgtttcttaatcactttaatgagtttcataccactagaaatggaatagaagtttcaatggaaatataattaaatagaaaagtcatttcctgtacttgtaatttccccctgatcatttctttattcacctccatagaaagggtgccctacaggtgtatagtgatgttattatacagacttatttgcataattcacttagattattagagctgaaaacaatataaaatgtaacattttattacaaatcaagtgtagcaaggcaatgtaaaactttaaaacgatgatatttctttttaaagtctgattaacatttactagttttacctaatttttcttgcattgttgatttcttgcctaaatatagatttttcttttagtaatgccttttcaatcttgcccgcttaaaacaattctcgggggaagcaataacctgaatcaataaaaacggcaaaagatctttggaaatagttggttctcctgtttgagatcaggagtaaacaaactgtttagctgggagcttatcaagccatgctaaaagtgtcagctgacacaaagtaagacacattagattggggttatcatacaatggggtttccccaagacaaaactctatactatgctatttgctgagaaatgatcagtacaaaagaaagtttcatcattcttgcattgtgatgctaaaagaaaaggccttgtaaatgtgtttaatttgctattcgtttacttcataaatttaatgtatcactttggagaatccaacagacattttggaaaaggtggcatttttcctgaccttaagtggggaacttgaggttttttacatttcaacataaaagtaaaggggcttgctatccatttagttaatacagtccaactgtatttgcctaaactgcattttttaaattttttatttttgagacgaagtctcactctgtcgcccatgctggagtgcaatagcacaatcttgactcgctgcaacctccgcctcctgggttcaaacgattctcctgtctcagtctcccgagttatggggaccacaggcatgtgccaccatgcctggctaattgttttattttttgtagagacaggggtctcgctatgttacccagactggccttgaactcccgagctcaagcaaccctcccacctcggcgcctcaaagtactgggattacaggtgtgaaccacccttcccggcccttacactgcattttagggtaaatatttttaggtttgtagttaggcaagtggtttgaagcatcatcagtctcaacctaaagctgctctttccttatgtttttagatatcaaggctttaagcaagattcagatgaagggcctgctttaccagctcacctatgaatatggaagcatcagcttactttttgcagcacatgtgtctcagggggttgtcccttcccacagtgtgtagattggcatcgagatgacgttctctctccagggtgcagtgatgaccgacatatgtgagacagtcgtttaatatcacctttattttgtactttctgtgatttttaaaaaacatacagagcagctctcttggtgactattgggctgataaagcttaaagatcagtaataaatagaagtccaggggctgggtctgtatttcgctaaggaaacctcatctgagcttcatgccctgtaaaattaagctctaaaacctcccctaaatgagatagctaaatgtcaaagcattttataaactgtaaatcaattcaaatgggagttagtatttttttttttcaaatgaacatgaggaagtatctttctgtatttagttttaatattctttgccaggtgtttattgaaataccttctttcattgtacattagtatatttaaaaagtgctttgcatgtcttgtttattatgaactactaattttttactaataattatttccatttccactatttactattctgaatgtcacatttatttatttatgttttttgggatggagtcttgctctgtcccccatgctggagttcaatggcacaatctcagctcactgcaacctccgccttctgggttcaagccattctcctacctcagccttctgagaagccgggaccaaaggcgcccactgccatgcctggtaacatttgtatttttaatagagacaaggtttcgccatgttggccaggctggtctcaaactcctgacctcaggtgatccacctgcctcagcctcccaaagtgctgggattagaggtgtgagccactgcgcctggcctgaatgtcaaatttaatcccaaagtttgtttcctcaatgttaaattgaaaaagaaatgacctttacagatcaggagtaaacaaactgtttagctgggagtttatcaagccatgccaaaagtgtcagctgacccaaagtaagacatgttagatgggggttatcataccatggggtttccctaagataaaactcctccatattatactattcaaatacttttaatatcttagtcatttttatttcccttgcaggcaatctctttgaacagaggtttattcaatgaaggaaaggtggagggaagaagggaagaattacaatggttagaaaagagcaactaaagattatttctattatacttctgaacggtaaactagcaattttaataaatattggggtccacttaaatctattaaagcagaaagtgtaaagctatctccattagtgaagagatgaagtgacaaaaaccaatcagtttttgtagcaactgatttagaaaatcttgtactgaaatcaacaattagacttgcacatcatagattttcaaatgtttgctgaattgaaaaagaatattcacaggaattatttcccccgaaggtgtcttatatcaaatagatgaacttcaagttgtggaatgtaaatcttttattaaaacagttgtctttccacagtagtaaagctttggcacatacagtataaaaaataatcacccaccataattataccaaattcctcttatcaactgcatactaagtgttttcaatacaattttttccgtataaaaatactgggaaaaattgataaataacaggtaagagaaagatatttctaggcaattactaggatcatttggaaaaagtgagtactgtggatatttaaaatatcacagtaacaagatcatgcttgttcctacagtattgcgggccagacacttaagtgaaagcagaagtgtttgggtgactttcctacttaaaattttggtcatatcatttcaaaacatttgcatcttggttggctgcatatgctttcctattgatcccaaaccaaatcttagaatcacttcatttaaaatactgagcggtattgaatacttcgaagcagaacaggcaatgtgcagccctcatttatgagaaaaccctcaggaaactcccagggtgatgcttggagaagctgtgagttgagctgaagctggagaacttcctccagagcaaagggcttaagaaagaaagaagaactctaagctgggtctgctaacatcactccagtttagatggatcttggcagagagacatgcttgttcctctggattggaaagatgatttactctcgggaatcttctctgtcagcctgtacatctaaaggcatgaagcactcaattgggcaattaacattctgttaaaaaggaagaaggaaaaaaaaattagtggcaaatactgtaaagtgtacagaaaaaaaaatgcggggaggtggggactcatgacagctgcttatagataggataatatttcttcctagtttcaagaacctagcagcatactgggcaataggagatgttcaagagttacataaattataacttaaactatattatggaatacagtgtttcacttaagtcatttatgagttgtttttttttttaattaattaaaacacttggttcattctgaagaaagatacctgtagaaagagactgtctagtatgagggaacacacttgtgctgctaatgcacttacagtgtttgttctctgatggtatctctgagaatactggttgtaggactggccagtagtgccttcgggactgggttcacccccaggtctgcggcagttgtcacagcgccagccctgagagagtagaggcatgaagtcaaatggggtttatgataacctgaggacatcgtaatttagtgtttgagttaaagaaaaatgtcacatcatatgcactggcaaaatataagcagttaatcactaagcaagctttgatgatgatttcatgcatttataactcttaatacattttggcttattaccatatcttatacctacatctgtctctctatgttgtttctttctcctgaaatgtctcttctcttcctattcaaaccttgcccatctgctgaggctcattccaatcccaacttcctcaacaagttctctgcactagatgatagaaaaggttttcaaagaatcctagcgattttaaaagggacttgagatcacatgaagaaacgttctcattttataggtaaggaaacagagacccagaggagaggagtgacttgcttagagggagcagggaagtcacacagtggaccactggtggagttgggcctgccgcccaggaggtggggtgacctggccatgttctttctaatgcaccactttgccactctcttcctaaacttccctaggcagtgacatggtagcctgtcacctggccggagatggcatgggagatggaaacgggaccaagctgagccagtgaggctcctgcctgaagtttttactggaaatgggaggacacacatgttctctttcactactgttcttaagctggcagggggtaaagcaagctcatggaggtcagtcatcaatggcaccatcagcagagaccccgctgaagcacgaagccagtgcatgggaaggcacgcggagcaagagggagtccgggcgccattgctggagcagcccctgaagccggtgggtcctgggactgttccattgtgtgggccatttttgcttgagttggacttttttcttacaactaaaatgcagccctaaataatacagtcactttcttttttatattagaatttaaatattttagacatatttctctgtttaagcacatatgccccttaatacctaacacaataccagtgactacctccttacagaatcactgaatcttgctttcatatgagaaagtgaacagtttccactcctgtcttaaatgtttcatttagcacttgagaatagaataagtgtcgcacatgaaaggtttcatgtgcataaataatgagaagatgctgaagtgagaccaaaatcaacttcccagcaaattcattctccatcacacaatttcataccagaatgactgagttctaaggtcatacaatcacagtcgttgtaagtgttaatgggagagagagagagagagagacagagagagatactgaattcaatctaaattccaatctccaattctcctccatcagaattgggagcacctccctccccatgtaatcactgggggtgaaacaagatcatagtagtttccatgggctgcccctggtggagccaagacaggcccctgaacacccctgctgccagattaattttcccaaagactattttccatcatgtttctttgcatcttggatacctgtaattggttaatgcatttggcattaaccaatgagtctcacccttgagtgtgaagcatgcccctcacccaccaggatttggggagttgctgggagggcatgtcttcgttgaaaacaaagggctgtcacattccattgcttttatttgagttacacataatttcattttgaaatttgaaatcatattagagaaaggcttattattttttgttatactgggcatattttagaaatggttgagaagtactggcttaaataatgggttgccaaggccctccataagccacttcttcccatctattttcttaccagaagacagcaggcagagggttggctcaccaaagcccacctgggccagctcctttctatcccagggggtgtgtctctctgctttctcccctcccaactaaaccttagtcatcgtaaacctcagccagttcatgcttctctttcttgctaattccagcctacccagaactgtatttgtcagacccacttagaacttaattagcttgactttgaaatgtatgctaatttaacatcttcaactatatcattaagagccaagccatttctcatttcctctgtttttcctatactacttagcacagtgctagacctataacaagcatctgttctgaatcaagagagaggttaaaagaagtggcattttcttacatctgagatattattcaaaatatttaacaacgttgccatggggacacctgtccatcagaatggagttggaggcctagagctacactgcacttaacactttgctgaaaaatagaagcagcctgagaatagtaggggaggggagggtctcaggctgcccaggatggggagaaccggctgaaatgaaacacattctatttaccactaattaatttgaatagtatctctgcttcactatttttcagtgtaaatagtatctctgacatgctagggagcttaggaaaatgattctaacatcatataaatgacaggtgttgctattaagaatgactcaagacttgtgtttttggtactctacatgccattcattcattctttctactaagagtaatagaaagaatgaatggcatgtaaggtagacatagagctgctctagagctctatgtcagcagttgtatgccaacaggaaatgtggtattttaatacttccgaagggtctctgcccctcctgtgtgtacgacacatccttgcaggagcccaccctttatcttatctaacttgtagggagcctggcacatccagtcttacccgctggcctccaaagcatgtgcaggagcaaatggcaccgagatattccttctgccactgttctcctacgtggtatgtcttcccatcatcgtaacacgttgcctcatctgcatatagacacaagacagatgcacgcataagctgagaacaatactgcagacttgatctaggggtgggttctatttctgtcctaaatttgtatcatcacagcgcaaacaccacatatttatgtgaatcatccctaagagcagtactgctatacagatcttagggtggcacttccaaaaattagacctaatacactggaaagggtccaacgggaagatggaaatcatattttaaaagttgaatctacagaccaataaagcttctttgtagcattttactgcagataatggtcaaaatactcaggttggacaagtgctaaagtgtcctgtaataacattaaatcatgactcatttttgaagcttgtctccactttcccaaatcaaaagattaagaaacccactgttcactcctcaaggagacctaaagtctccaatcatttctgtgaatgagagttacagcctgataatgaaagtgagaatgcttaataaggcactaaaaatgatctgtgatgacatacgagggtcacacttgaattctccttttccgttcccaagacatgtgcagctcatcatctggccattttctccctgacggtcccacttctctccaatcttgtagttcacaccattgtcatggcaccatcctgtaggggtggggaaagtcaggaccaaaaagttatttgtatattctgactcacaagacagtaggtgaactgggacgtgtcacagggtcttcagaaccatgatctggaaaaatagcaagttaaagataaaaacccctataatgggccatttattttatttatttatttactttttatttatttttttttttgagacaaagtctttctctgtcgcccagactggagtgaagtggtgcaatctcggctcactgtaacctccatctcctgggttcatgcagttatcctgcctcagcctcctgagtagctgggattacaggcactccccacagtgctatttttttttttttttttttttttgtattttttgtagagatggggttttaccatgttgggtaggctggtctcaaactcgtgagctcaggtgatccacccgcctcagcctccaaaagtgctgggattacaggtgtgagccaccacacctggccaatgggccatttctttggttgaattttaaaatattattttttatcatttaccattttctagggcattttaagacccaatttattctgccacaatcatgtcatcagaatagtcaaatgaaatgactttcatttgaattctcactattaagatttaaaattgtggaaaactaaagtgggattggagtagactgttaggaatagatcctagatgaaaaatcacttttggatttgcagaaaccctggatacaaagtagttcaattaaccataaaacaaggatcagctgatctctacacgccaccacctgtttcatgtacatgggaagagtaaaaaatgaacccggataaaataaaacaaaagcaaacaaaatgctaaatcattggttattatccacatcaaataagtctggttctgtggaatatctaaaagtcacagttttatgcctttaactactatacataagggatgactttttaacctccagggcttatacaacaaaacacacctcagaagcttatataacaatatactactttttccattttatcaacaattcagcctgccttaagctacaaagtaaaataattagacaactgtgatatcaaaacaaagattatgtaagttgagccaaagagtcacataaatgaacttgacatccccgctcccacaattgcacctaagtgctcaaacaggtaataaacatacaaacttaaacgtagttcgatttcaggagttaaaaaccatctacttgaagtcaaatattaaaatttccagctcctaaacagcatgtgatgtttttagtgtttttcattttcagatggtcaaacatggaagtctatattgaaaacactggctggcttttacaacttcagtctggattaaatgatttcaagtatacaagttaagtaaaatactttgaaaatctcttttaccaagtcttatattctaattccacaggatatgatttctgtatgtctataggaggcttatttataggcataacggtcaacacctataaaaatgaaccaattgtcaataatcatcacatctcctaaacacaaagaataaatgaaaggtttataaattctaatcctaatctcaaagcataatagatatttcctaggcacattttaacttaaaaaatttgaaaattaaaacgtattagaatttgaaaatcaaacatttatcaattcaagttgatttttaatgatctaaaagcagattatctgttttttctttcatatttctagcaacgttcaagctacctgggctatgtgtgtgatgcaaaagtgtgtgcatgggtactatgatatgtgcatgtttggtttatgttgaaggaggctgtttttgagtctaaatgttcacctctgatctcattcaacactgaagattaaaagagatttgaggtttttctgtgtctctaatactcttaaatagacctggttccaaaagtctttatcaatttgttttcacagaaaatttcaaaaatcaaattagcaccataatcttatgtgtaattaatagttgtattggcatacaacccttgaaatgaagcaatgtccaacaagtaaaatttcccatcatttttctatgatgcaaaatattacttcgagtcaaacagtattctcttgtttgcttcatgtttggaagaacctgtgtcttccaaacatgcttccttggcacatgagtgcatgcatggaacttgaggagacaaacacggaagtggatggacaaagcaactactcactagatgaatcacatctgaaatgaccacttccaaagcctaagcactggcacaacagtttaaagcctgattcagacattcgttcccactcatctccaacggcataatgggaaactgtgtaggggtcaaagcacgagtcatccgtaggttggttcaagccttcgttgactatgaagaaaaggaagaaaaagcaaaaagagacatcttattaatcgatttggaccataagaagaaaatcgaatgactgtatacaatgacttaatctaaaacaagaattccaggaggattaagaggcattcatctgttctatcaaggcattaactgctctaaaaaaccatggttagatgtgacacctgtcacaggcacccgacaggaagcccatcttttatttttcccttgcttctaagataattgccatttctgttgaaactacttcatagaacatggaacagatcttgaggcaattgaagctagtggagaactttagtgggatgcaaagactaatgatgcctctccattggtacctgagtgaccttgggccagctatttaataccactctgccttgcttccctcatctgcaatactagcgtaataataaaaatatctatacctcctggggaatcttgtgaagattatataaggccatgaattcaaaacattgacccttttccaagacttagaaaatgttcactaaataaagaataattattaaaggctgtcttttgcttataatgcaaaagtcttagcattttaatataccattataatgtaattttcacttttattattgtaatttttgcataatagtgcagaaagcctagattttggacattgttattatagtggtgagacagctttatcagtgaggtcaactgttccaaataagaaaatgcccttggaatatagatgatttaggaataagtaagggagtctcttcatgttacctaagatcttatctctttatgatttggaaaagcttattttaaaaaaatctatgcaaacaaagcatgcttcaaattattccctaaaaattagataaactaatttgacttaaaatcccactgtgtatttttctttttacagtgcaaaactcaaaagctcaaaagcagtagatatttgaggtgcctaatttttaaaaggtgtcacccttaaagaaaatagcgttttggagaactggtaagtctgagacgtctcaaagctgggagaacctggttagaatgtagaatactgctgctgggaataaggagtttaaaagaaaaatggaaggaacttaaattgttactaggggtttctatactcaaaagagccaggagttcaaattccatcctaactaaagttaaagagatggaatctttaaaaaaaaaaaaaaaaaatgacttagaaaagcacaaagacctttttgctcttgaaaattctgttcacgtggcattctactagtaaaaccacaaaaggcaaagataagcattactgtggatatgtaatacaacaaacacaaaataatctcctcccaacctctctccagccaaatgctcaactgcttaattcacaggaatttatacatgtaaagtagcacagtcttctatcagatgagggaaggggctaaaattaaacaactggccttaggaataaaatctgtcacttggcatagacaggacttagcactctctgttggtgtggagtagagaactctcctgttggaagattggggattcacggttttgattatcccctatctcatgtgccttggtgaattttcagctgctgcaaattgagcagccaggtggcacgctattgatttaaaaggatttcccaggtgctacaaagaagagttaatgatcttttaacctctatagaagcttttaacctgtatagtcagaaaaaaaaatggaaataacattggaaaaaaatggaaataacattggaataacattctctgcagacagaaatgcacaatgttggtagcattttatatcaggagcaaaagccaactgtccccatgtctgcagaaggggtattttctttataggtaatcgtttcagtatttaatcactcaagaggacagcagcatggtgagatggagagggtctgggaaaagacatcaggaaacctgtgccctatatcaactcagatactcacaagtaaggactcagagtgttgtactaaataatatttgaaatcccttccagatctataatcatatcaccatttgagagtctgtcaattacgtatgcattttgtgaagacaacaggatatggcaggaggtgggggagagattaatttaatataaagttgctcatttatttcatgttgatgtgttgcattaaatcccaaagataaaaagacaatggcaacaaaggtacagtcaacagaaaagcccatctctggtgtacagcagaggggagcctgtgtctaaatagtacgtgtttacataccagagttgcccacggtaacaacctcttcccgaaccttatgcctctgctggtctttcagtgcctccactatgatgttgtaggtggcacctctggtgaggcctgtcagagtggcactggtagaagttccaggaaccctgaactgcaattatcggtacatccaaagcagagagaaagcattatagtgaggaatgacacgggctctcctcttaccaataaccctcactgtttaaacaaagcaaaggaagacaaaaaacaaaaaacaaaaaaaaaaaaaagagggagggtatagtggtcctaaccagctgaggagagaaatggaacaaggataggggccatcgttcctgccagattttcctgccaacaatctacctgcgtgctccgtagttaacaggagccctcgacaatactagagacggcctgccattgatcttgcttcagtcgcaggtctgcataagccctctggaagccctggccatgtttgcttcacataaaacctggacactgcgctatatgggagacacggtcatgctcctccaggtgacatctgaccccagtgtggagtccttaaaacagttgggcaaatcctcaaactcatgtttctaagctcataaatttcctacagtgttgtcagtttttaaattctgccactttctaaaagtaacaacacaataaaaattgatactgtcagtgggccgggtgtagtgggtggctcatgcttgtagtcccagcactttgggaggccaaggcgggcggatcacgaggtcaggagatcgagaccatcctggccaacatcgtgaaaccccgtctctactaaaaatacaaaaattagctgggtgcggtggcacatgcctgtaatcccagctatttgggaggctgaggcaggagaattgcttgaacctgggaggcagaggttgcagtgagccgagatcacgccactgcactccagccagggcgatagagcaagactccatctcggggaaaaaaaaaaatggatactgtcaacacaaattaaataatatacgttttagagaatcaatcacttatcagctgctatgcacagcttcgcctgtttttttttttctttagatatgttgtagatagtggggttcttcaaggacaaatcgtaaaggtagtgttttagacttctgcacacaaatggaaattcaggtagaatatctttcttttctagaatcatctatcttactcaaaaaggaacctcaaatgtgtgagaataagagaaatagtttcattttctctatgaaataaaagctagtgactctctggtatgtcctccaaagtagagccatattgggatttaaaaaaaaaaaaaagcagggcttaaatgtgccatcttctaagaggttctaaaagtggagccactttttttttttttttttttcaagagacgaggtttcaccatgttggccaggctggtcttgaactcctaacctcaaatgatccacctgcctcggcctcccaaagtgctgggattacaggcgtgagccatcacacccagccatgaagccactttttattcgagggctggtcacttcagttacctaacttattcctttctgtgctgccccatgagaagtgaagagaacaattaattacctgtaagggttcttcatcagtgccaacaggatgacatgaaatgatgtactcagaagtgtcctggaatggggcccatgagatggttgtctgagagagagcttcttgtcctgtagaggcatttggattgagtcccggaccgtgtgggtacaggtgatagtctacatcttccctggggatgtgaccaatttggatttcctcacctacattcggcgggtatggtcttggcctatgccttatgggggtggccgttgtgggcggtgtggtccgcctaaaaccatgttcctcaaagatcatttgttgcccaacactgggttgctgaccagaagtgccaggaagctgaataccatttccagtgtcatacccagggtgggtgacgaaaggggtcttttgaactgtggaaggaacatccaagatctctggtccatgaagattggggtgtggaagggttaccagttggggaagctcgtctagccgagagaggttagagccaaaaaagcaaagcgcattaagctccaggaagtagcagcaatgataataatcgattcaggcaacaatgactgttcatcaatttgataaaagccaccagaaaatgagcagttctgagatcacaaaacactttttccagaaagaaatctttaggatttttctcaaaggtttctttatagtttagaaagaaaaaagtgttagtatgaatttatcatacacacagctttaaaccgctgagccccgtagaagctgcctctgctcaaattagacctaatggaactgaaatgtgcagtctttctctttctctctttcttttttaaatttgagaagcaagttgtaggaagtagaatccagactaatcatatcagtgtcataagtatgagaattacagaggtttggctcaacagtttttcatggtttgaaatggtaaaaatagataaaacacacatgttcatttttgaaattttcctatatcaggaatacacattttcttgaaattaactgaaactggatgcaaaagtaagacattatttagctctaagttgtagaaaccaaataaagataaatgtgagaggtttctctccctcctttaaaaaaggaaacattttaaaattcaacagaaggtataaaagaagagcaatgatagctcttcttttacattttaacatcttgtttgaatttttaaaaggtgaataacaaggctttatattgagtggctgtagtaaagaaaaaaaataaaaccaaactctgcagtgcatgttaaattatttctcctattaaagaatacaatatatacactatgctgttagataaaaaaaatcacaagaaatgcatcaaaacatggagaaccttttcatattgcaagattgctcatttgttattagttttgtcctatctttctccttgttacctgcaagatactcttacctgtctttttccttccaatcaggggctcgctcttctgattattcttcagggcaatgacataaattgtatattcggttcccggttccaggcctgaagggagaatagaaccatcacattatgtcaatgggctcagctagtcaagtggaagtcggtctcaccagcagacgctactgggagcaggcacttcctctccagctggctgttggcctcttgaaggtaaaatcgacttcacttttcctccataaacacccaaatatcctgcatataaagtccgcatcgcaaactaattatcttactatcatatctgacgcctgaatagacattttttggctaacttttccagggtattctttttttttttttttttttttgagatggagtctggctctgtcacccaggctggagtgcagtggtgctatctcggctcactgcaagctccgcttcccaggttcagccattctcctgcctcagccacccgagtagctgggactacaggcacccatcaccacgcctggctaattttgtttttgtatttttagtagagatggggtttcaccgtgttagccaggatggtctcgatctcctgaccttgtgatctgcctgcctcggcctcccaaagtgctgggattacaggcgtgagccaccgcgcctggcctttccagggtattcttttaacgtggtcttatttgcctttttgaatttaagaaaatctatcagcatcatataccaccactggaatataaatttgaaagagagtcctgcagattatatacatgaatctacttaggcctaataaccaagcagtcctcagtggcagatcaatgaaaagtgaaactaaaggcaagtgaagggtaggagagattggccagtgtttgtgcagcctctgtgggaagtgtctagttcaattcctctcatgtctgcttctattttcctgttccccccaattctaaaaagccagtgtctccttctaatgtctgtatgttctgtgggaattttaaagtccaggtgatactctatacagactgatatggtttggctctgtgtctgcatccaaatctcatctggaattgtaatccccatgtattgaggagaggaggtgattggatcatggggtggttcccccaggctgttctcatgatagtgagttctcacaagatctgatagttttgtaagtatctggaagttcctcctgtgtgcttctctctcctgctgccatgtaagacatgcctgcttttccttccaccatgattgtacattttctgaggcctccccagccatgcggaactgtgagtcaattaaacctctttatagcagtatgaaaacagactaatacagatagtttaaatatttcatctcttgggcaaaaataatactagaggcttatagtctttcccaccaaggtagacaactcttattccccattccaggcattcttccaatgtgggtggttgggactgctctgcctcaagacctatcctgtgatagtggtcaacaaggtcaatggcaggtggtgcactggcaagtcctgcaagattgccatatctatagagagctgagtgtaatgacagaatcacaatcagctagtatgctttgaaaaatatctttctccaggactgaattgacaggtatctggcaaacttgcagcgaaaggaaaacatgagtctagtcatgccattagtacagtcttgaaattgcattttccttcactcatgccttttgggatgtattaggctctaccactcctacacagagaatgctttttgaggttatcaggaacagagtttcgcattctcatgacacagtatcaaagacgctgtgggagtttgctaaggacttcatgtgtcctaggtagtaagaaggaaaatgacagcatggaagcagcaataccagtaatagtagcctctgtgacaccagggcggggccgagggaccacttctctgggaggagacccaggcttctcatacttgatgatgtagccggtaatcctggcacgtggcggctgccatgataccagcaaggaattgggtgtggtggccaggaaacgcaggttggatggtgcatcaatggctgaaagaaaacaaaattaagtctctaagaaggcaaataaccaagaaaattactcccacacttttctcccgagccgttctaaacacacttaaaagaatctgagaatactgtaaaccggaaacaagattctctggaatctataatacaaaaatatacgcctcacatttgttttttgagttcatgaaactgattgcatacaagtcaatggcatttcctcagtagaaggtatagttaccagtggaggcgtcgatgaccacaggggagctccgagcattgtcattcaaggtgtacaggtagatcttgtagtcagtgcctggttgtaaacctgggatttgagaagagatgatttttaacagttcttgctttttactaggagaattctcaagctagcctgcaatttttctgggttcttctatcatcccatatttatatagactaccaaagtggtccacatttgaacagtaaagtagagcatgctatggatgttaactgttaacaagaaacatatctcgaaagtgaatcactgatacagacaaggacactggtaaagtaaattctggaatgcaaaaatgctatgttggaagaggccctcttgcagaatgggggtcagccacttattgaggttttctctttaccgtaatcagatggtcaatagttgagccttggaatcacaattttaaaaagctaaaaaagacctcagatattgaatattcttcggttacaattttggcctttattaagtggtattgtttacttttatattaactatgctttttaatgctaagatctatacatcactgttttttatttcttttagttttaaaccttatgttacaattttttaaataagaaagggcacaatgatggaagatcaaacttgttgattgacacttacgcaatttccatgacaaatattacacaaaatcaggcattcaaaggacaaaactatttctgatcatagcatgaaaataacgttctaaaactgggttatgatgataacactgaaaataaattttatcagtgtcagtcgtagaacagttaataagcccgtttacattgtgggtatttgttaacaaatgtggttagtgcaatgagttccctgacctgtgatggtgtagcttctgacatctggcttgatggttctctggattggagtctggccattggctggaacggcatcaacttggaagccagtgatcgtctcagtcttggttctccagctaatggtgatggtggtctcagtagcatctgtcacacgagcccttcttggtgggctgacatctgcacaggagcatagctagagattagtgcctgcttggctcatccatgtaaagttttggtattttaaaacgtttccttggtatatatcaaattcatccatttcaagaaatatataactagtaatgtgtagattatctcctttggcattcagagagaaaggtcaactgtaattagaaaataggaaaatatctacctctcagacattttattttgaagagctgaaaagctttatagatactaccagtggttcccagggctggctttatagtatctacaaatacttcaataaatattaaaattattaatgtattataatgtaaaaatatgtgtggtaggagttacaataacatggccagctaacaattttgtgtgtgtgtgtgtatgtgtgtgtgagagagagagagagtgtgtgtgtgtgtgtgtgtgtgtgtctaatattacggcaagtattttgtattttctctcaacaggtacaatgccatccctcttttataaatgataaaactttgacactttacctgacttttgaaaaggcatacatcaaggtattgatataacagaagactagaatctaagcctgatttggtccaatggttactgtgctgtgatataatttggatatttgtccctgtccaaatctctgttgagttgtaatctccaatgctggaggtggggcctggtgagaggtgtttggatcatgggggcagatcccttgtggcttggtgccctctttatgacagtgagttctcaagagactgggtcatttaaatgtataaggtcctccccccccaactctctctctctctcggtcttgcttttgccacagccatgtgatgtgcctgctcccccttggccttccaccatgagtaagcttcccaaggcctccctagaagccaagaagataccagcaccatgcttcctgtaaagcctgctggcctgtgggccaattaagcctcttttctttagaaattacccagtctccggtatttctttatagtaatgcaagaatggcctaatatgcattgttaagatatagcagaagccagtggtctccccaagcttagctctatgaaaacaaattctaacaagtagagcataaactagatgtcagtcatagtccataatatcaacattataagcttatgaagtgattccattttatgggtcagtagacccctttctgaaggagtataaaagatgacagtcatgcgtcaaaaaggcaatcaaattgattttcaaattaggactcattccactgttaacatataaatctaaaaaattatttattttatttattttattttttttaagagacagggccttgctatttgcccgggtaggtctcaaactcctggcctcaagtgacgctcccgcctcagcttcccaaagtgcttggattttagacatgagccactgaaccccactgatttaccattctttaatttttgtctatacagaaggtttgtccatatgaagacattttgttacttactctccagagtggtgacaacaccctgagctggtctgcttgtcaaagtgtccttaagagcatagacactcacttcatatttggtggccacctagagaaataagggcatggtgagctttagcaacgtcctcaactgaaacccaaggagtttcactacagcattaggtaaatgcaatggttagaaaataaaaaataaacaaaccagcaaaacccacaaccttgaaaattcctagattaatttcattcctacagtgcaggtgataaatgtatttatcaattttaaaatgctcttagcggttaagcttaagtaagccatagattatatacttaaactaagctggtaaaaaaaatgagaaaagtgggtattagcgtatttttcttttttatgatctgacaggtgtaaatcataattttttccttatcatagagaggcaaagagaatgttccattttgtctctgaaccctctttctgtagtttcccctgaaattggccttatgttaagaggtacatcagtcccctaggttcctagcagttttctgcatgtatgtctggaaggattttaaaatgttttaatgagggtaggctcaaggtagactggtacaaactgtaaaatattctttaccaaggtaacagagctcagaaaatgcataactaagtcgatttatgcattcaaccaatggatatgtaaattgccccccacaaccttttaaaataagcacaatacatctaaaagagctgcacaaaatccaaagctgtttataaaattctgtcccaatagtcatctggaaaacttaggtcaacataaaggaattccgttgatataaaattacaataagattatttgatgcagaggaaaagaacagttagatttattatgatattatattttcaccaccttagaaactgtgttagagatgatctccatctttattccaacgaacaacggtcatgtcttaccataagtcctgatacaaccacggatgagctgtcaggagcaaggttgatttctttcattggtccggtcttctccttgggggtcacccgcactcgatatccagtgagctgaacattgggtggtgtccactgggcgctcaggcttgtgggtgtgacctgagtgaacttcaggtcagttggtgcaggaatagctgtcgagattgtcattggttagaggttatcttataggaaatgggggaaaaggaaaataaagtgagttccaagaagtagaatggattgttcttgttgggctaggtgggttccctggtcaagcaaagattcagtacaagaaagtacagtaagggatgcaaaatgaagaaagtgtttgctgagaaatgtgttttatatccaccaattctcagaatcactgaaaacatttgggtaaatgccaaaactctaagagattttaggttttacaagttttgctttcccttaaaaaaaaaagttacattggcttattggccattatgatttattttacttttgtatggaaaaataagcaatggccctttttctttcttaaaattgttaattaattaatttagaaacggtctctctgtgtcatccaggcagcagtgcagtggagttatcatagctcactgcagccttgaactcgtaggctcaagtgatcctctacctcagcctcttgagtagctgggactacaggcatgtgtcaccacacctcgctaattttttcatatttttttgtagagacggggtctcacttcattgcccaggctgatcatgaactcctggcctcaatcagtgctcccggcttagcctcccaaagcactaggattacatgtgtgagccactgcacccggcctcctttttctattctacataaagtatctttgtatggataaccatttcacgcagtattccatccaaaaaagagagaataatgtttttattgtctctttatttggaccctatggcagatatggctgctaaatttgacgttctctctgtaatgcggcgtaagaagaaaactggctcccaacagaagcagaaaagagaagcgaaaagcaataatacagactgtcacctctagggtttatgctgtcactaggatacatctttagcattctactctgcttcagaaataaagcacaagaagataaagtattatggaaagcaattgccctattgattatttcctaggtgtctaaatcacaatcatttaagctaattatacaccagcatatgatatctaaccagagaagaaaggtcttacccacgtgtgctcagaatcatgctgctatgaaatgcccgagtttgggttcctttttataagtaagctctgtaatgccaaacttcttttctttatacatagtgagggtaatcacagggagtcagagcttaggaaataatccacaactttagtatcctcttcaaatgtcttgctttatggtcttgtgtataagccaggatactccaaaatttcttttaatcagacttgtttccttaaatatcacctaagttttattgtttcttactattcctctttaaagaggatctttcctaataattctttttcacccttacacgggaatcaatagcccagtgaagcataattcattcagtagggcataaagccgctgctcccatgggcacctggtggtgcaattaaccatatacctgtggactgggttccaatcaggggctggctctccatatcatcgtgcaaggcaaccacactgactgtgtactcagaacccggtctgaggccttgcagctctgcagtgtcttcttcaccatcaggtgcagggaatagctcatggattccatcctcagggctcgagtaggtcaccctgtacctggaaacttgcccctgtgggctttcccaagcaattttgatggaatcgacatccacatcagtgaatgccagtcctttagggcgatcaatgtctgttaggcaaattaatggtaagaggttatgtgaaaagcaagttgtgaaataagcatttttataacatgcaaagcagttttgcagataccattttctttgatgaagtccaattaacccactatcaaaaggaaaaatcacttaaacacttgcttaatttttcttggtttagaaaatatgcaatgttgcatcacttattaaaacataggtgtatgtgagataagcagataccctgcaaaatgtccccacaatggggatgtatttatattaatttaaagatattctaccacgatttgatttttacaatgtgatgttagtctcatagacctggattttctataccttggaagtggtaaagctgatttgcaatgtcagattcaaattgttataattgttttgttttgtttttttttgagatggagtctcactctatcacctaggctggggtgcagaggcatgatcttggctcactgcaacttctgcctcctgggtccaagtgattcttctgcctcagcctcctgagtagctgggattacaggcacgtgccaccgcgactggctaatttttgtatttttagtagagatggggtttcaccatgttggtcaggctggtctcgaactcctgacctcgtgatccgcctgcctcagcctcccaaaatgctgggattacaggcgtgagcccagccctataatggttcttacactcttcttttcccctctctattaagcatttatattacactctggtccagccatagcccttcaaatgccccaaacataaagctacatgaggcacacttcaatcaactttaccatccagttgtagaaaagacggtctaggaaaattttttgtagatttgctataggcaaataagatttcgctgaggccatttgagcaaaagaaattcaaagcacagcaactaactatggtggtttcacaacttctttctctgtaaattcctcgcttggcactgagaaggaaaaaagatgttcgtaaagggctcagctcaagacataaactaaccaacaagttcactttccctatgtgtaattgcaaaagacatgtcgtgggcattcagacacccaagaacaaaatttgactttgaaaatggaaaccaagcagtggttacgtactggttactgcagtctgaaccagaggctgactctctccgcttggattctgagcatagacactaaccacatactccactgtgggctgcaagccttcaatagtcatttctgtttgatctgcaaagggagtgaaaagcaaatgcaacatccacgtcatccactataaagtcctcaagtggcgtctagagtttggtagtaaacatatggtggcctagaatttttatttgcagaattgtaacaaaaatatggagagtcagactttgatttcctcttggacaaacctgttcattgctaatacaaattaccatatgggagtgaagtcacactcaaggataagatctaaaacttaatatgatgcccccaacaattagtgatactgctctcagaaaaaatgaaaattaacttgactctaataaattgccttaagatcctaatttcacaagtattctatttaaaaacaaagacaacatagctaaaaagagctgaaaaagtcagttaggccatttatctcttcttagtgtgaatgataaacaaaaccagaagggtgaatctagtaatttaagatgtccatatcactaaatagaactatccatgtaaaaacagaaatgcacttaagacttctactgtgaaaagggttgataatgatcttgagccctgaactcatgaatggggacaatgatgacataggacaaaaaaatacatagtactcacaacaaggtagccatttatataaaaaagaatattaggtggtcctaccccatctatcctgttgtatatgagatgcagattactctttttttttttttttccctgagatggagtctctcactctgtcacccaggctggagtgcagtggggctatcttggctcactgcaacctctgcctccagacttcaagccattctcctgcctcagcctcctgagtagctgggattacaggcacaagccaccatgcccagctaatttttttgtattttttagtacagacggggtttcgccatattggccaggctggtctcgaactcctaacctcaagtgatctgcccgcatcagcctcccaaagttctgggattataggagtgagccaccgcacctggccgagatgcagatgattcttacctggacctgcagttttagtttttgttggtcctggtccatttttgggagtggtggttactctgtaaccagtaacaggggaacttgaaggcagccacttgacactaatgctgttgtcctgaacatcggtcacttgcatctgggatggtttgtcaatttctacaaataaaagcagggagaaaccagtgaagccccagtccttggagacaagattggacaagtcctcctctctaggtctggtacatattcgaatgatctcttacatgagaaaggtatttcttctcgaaagaatacagagagagcttttagagggatggggcaggcatctcaataccatttcctatttttgagatggttgcttcattcacaaagaagctacattccacaagcaggtgtctcttcctactttatcaactcatccattcttttcccacaaatacttactgaacactctctatgcctgtcgtattgcagacatgcggaatatatcgacaaaactgactgaacttcctgcccttggggtgcttccttctttatctggctcaaaactctgttcgctgcaggtgctagctgcaggttgttgctcattaaaaaggaaaatctattctacaattagaaaaataccttgggagaacattgcaaaacagtatctgaataagtaaaagctggtgtcaccccagagtagaagtttgtacctgttcggtaattaatggaaattggcttgctgcttgcggggctgtctccacggccagtgacagcatacacagtgatggtataatcaactccaggtttaaggccgctgatggtagctgtagacttgctcccaggcacagtgaactcctggacagggctatttcctcctgtatgaaaaagggttagttcagagtgtgaggggtttagagctacttgggtattactgattaattgaattaccacatttatagcagcatgtaaatcacatcttcttgcttattcccttttaaagagcgctatcttgaacagaaaggggtatttatgcatgtagcaaaccttggtaagtgtataaacattgagagaaaattacagttagcgctgttttaacatttcagctttaaaatgtcactgagtagtagagtagcattagaagtgggagaaggtaagccctcaacccaggattgcatgcattgtgtcctttttaaaacttttaacagaatacattccttttaaataaaatttggaaaatacagaaaagtaaagagaagaaaaaataaaaatcacttatttccaccactgataatatgtttgtgaatttacaatccttttatttcctcagctctgccgttccccctctagttgtagtatataaacaactttttatttgggttttagaacaaattatatcatctatatcttacgtattttcttggaaaaaacaagggctccgttgaatggacttgccaaagtttctttaattctttgttcactgttgggctttcaggttatccacaacagaatctgatttaatcagagtgtaaaatagcattttactgctgtacctgtttctccgtaagtgatcctgtaatatctcactgtgacagcaggagcatcccagctgatcagtaggctggtgggggtcgcagcaacaacttccaggtccctcggaacatcagaaactagaaaaaaaagggaaacttttcacatccgtaattttcaaacaatattcagatttactgtttgttcattttccagataattgtcttaatgattcttccatacaatcatgtaaatactatgtgtaattagcagaattttatattatgacgaattcaagataaggggttacagagcccattcaaattgtgataaaatgattatttcaaatttggggaagagtttttttccctcaacattttatttggaaaaatttcaaaactacagaaaagttaaaaaaaaaaaaaaaaaaaaaagtgatacaaggccgggcgtggtggctcacgcctgtaatcccagcactttgggaggccaaggcgggtggatcatttgaggtcaggagttcaaaaccagcctggccaacatggtaaaatcccatctctactaaaaatacaaaaattagccgggcgtggtggcgggcacctgtagtcccagctacttgggaggctgaggcaagagaattgctcgagcctgggaggcagaggttgcagtgagccaagatcccaccattgcactccagcctgggtgacagagcaagactccatttcaggaagaaaaaaaaaaaaaaaagtaatacaatgaacacctatatacccttcccttaggtatttgtctctggcttgacgacttgagactaaaatacagataacatgatgctactgttcccgtaagtacttcagcctctatctgctaagaacaatgacactattaccctaaaattatatttttaaaggtactttgaaacagtgttcagttttccaccttttttttttttttttttgagacagagtctccctctgtcaccaggctggagtgcagtgacacaatcttggcttactgcaacctccgcctcctgggttcaagcaattctcctgcctcagcctcctgagtagctgggactacaggtgcatgccaccacgcccagctaatttttgtatttttagtagagacgaggtttcatcatgttggccaggatggtctcgatctcttgacctcgtgatccacccgccttggcctcccaaagtgctgggattacaagcgtgagccattgcgcctggccctttttttttttttttttttgagacagggtcttgctctgtcacccaggttggagtgcaatggcctgatctcagctcactgcaaccttcgcctcccaggttcaaagattctcctgcctcagcctccccagtagctgggattacaggtgcatgccaccacaccttgctaatttttgtatatttagtagagatggggtttcactatgttggccaggctggtcttgaacttctgacctcaagtgatctgcccatttcggcctcccaaagtgctgagattactgacgtgagccaccccgtccggccaattttctacattttcaacaaaacttgtgttattagaaatgcataaatacccaaatcaggtgagaaatttcttgagaggaaaaaaattatcttctttactgccaccacgcccgggcttctttaccatattctaaggaagatgtttctccacattttctcacttccctctccatgtaccatgacaatgatctatttttttttttttttttttttttttgagagctgatgacagacaacagcaagctactttacagaatctaccaactgggtaggaaagtcttctgagtttctttgcagacaagaaaagttacctgttgattgttggccaatcaataagggactttcctctctgccattaagagcaacgatgctgaccacatactctgtgcctggagtgaggttggtgagggtgatggaattccgagagtggggcacccgatcttctcgaggtctcccactgaagtgctcgggatgatggcggatcctgtagccagtgatggtggctcgaggagcaatccagtgcacagtaaaagagttggcagtaatatcagaaaagtcaatgccagttggggaatcaagacctgtttttcccacccgggggaggaagagaaaaaaaaaagaaaagacaccaccagtttaggaagtgaggaaggtgtaggggaaattaacgtacatccaacatttcgttcctgtctcatcaataccatgatttgccataaaccaaagagtaagatgtactgattctaagctacatatgaattttaaaatcttaaattgactcaattcaaaatagccagctcaagcattcatttttttcttgtgctaagtaattcaagcagattttaggggttattacagtaagtttctgtgtcacatttggagataagtgttcaagatcttctgagaattgacattttcaaattcttcagtgttcaagtattctgtgtttctatcctgtaagtgtatccttccaagtaaagcaagatctgcccactctcaaagtaaatgtttgactctcagagaagcctcctaagctcaagaggaaatttatatgtcaacagagtggtaatgatgccaaacacaaaactttctgaaactaaagacattatcccagacaaattacaatgctgataattcctcgtgaattgacagttttgaaaaatgcatttttcaaaaatgcacaaaaattcagagtttgttgcaaattcaaatcacttagtctctgggacttccagcaaatttctgtttcagttacagcatttactagttcttttcaataagaaaccaaactaagatatcataagtcctttttggaagcaagtggactataaataaattaatgaatacactaaagtgtaccttttgaaagaaaaaattaaaagcattcatatttaagtatgtaatatttatgagattcaattcaacttccttctagtaaatgcatattttattaagtaaaaagaaaatgtaaacttgctggcttagtaaaggaagacaaatagatgacaatgagtgttgggtcagccattagacagagctgcctaatgaaaaggaatgtctgctaaatctaaataacaaagatcttcttagaaaatgttttttaaaaggacagacaacaaatttcttaatttgttagtgactgaaagtctaggtgattgttgagtaaggtatcttttagtttttgagaccagcgataaaatcatactgtgatgacaaaggtacacacaccatgacaacaaaaaatggagatgtatttttagaagtagcatttcatttgttatacagaattgataggcaaaagctactggatagtcatactgccaacaccactcacctgttttctgtcttcctctaagaggtgtgctctcatgttgttcgtagacactggagacactcactacatattctgtaccaggcaggagatctgtaggggcaaatggggcttattttaaaactctgctcaaaagcatgagaaactaaagcacgcccaggactatttgaactgatgaaatatccaaatgtccagtcctatagcctacttacacctaagtgaacactacagcgaagtgttcagtgaacagaccttgagaaggtctgtaattagatgataaggaagggtcaccttgccccatggcctctcgaagccctccattccacctgtgagtgtgactcagctggatttcgagtgggatgaagttgctgcaacagctggatatttctcgcatccacctgagagtatgtctctggagggcacatgataatccttgctgtggtgctgtggattgccatttatgcctcacaacaaccctggaaggtagtttgctccttttaaaagcaatttcttgtcatacaacgtactgcatatctttaaagtgatgggtttttacatatgtgtgacttgggagaccatcaccgcattcaagaaatgaacaaacctatcacctctaaaaatttgatttactacaattatctccattttgtaaatgaaaaaacaaaaaacaaaacaaaaaaaaactgaggcacagagaagttatcttctttaatttacttgcccaggatcatactgggattgacccaggccaggactagtggtcttaataattaacctttactggaaaaaagccacacttagaaagcaatcggttctgccatattaaaatgagagcagaatattttttaaaaaattaaatatacatccctgagtatcttgttccatttttttttatttttattattttttctttttgacgaggttttactctgttgcccaggccggagtgcagtggtgtgatcttggctcactgaaacctctgcctcctgggttcaagtgattctcctgcctcagactcctgagtagctgggattacaggtgcctgccaccatgcctggctaatttttgtatttttaatagagacggggcttcaccgtgttaaccaggcttggactggaaatcctgaccttgtgatccacccgccttggcctctcaaagtgctgggattacaggcgtgagccactgtgcccagcttcttcttccattttgatacacagtcaggcatagcttaatggtggagatacattttgataagtgtgtgatttggtgattttattgtgtaagcatcatagagtgtacctacacaaacctagatgggcttgtaatcccagcactttgggaggccgaggagggtggatcacttgaggtcaggagtttgaaaccagcctggccaacatggtgaaacccctcgtctactaaaaatacaaaaaaattagctgggcgtggtggctcacgcctgtaatcccagctactcgggaggctgaggcaggagaatcacttgagccttggtggtggaggttgcagtgagcccagatcgtgccactgcactccatcctgggcaacagagggagactccgtctcaaaaacaaaacaaaacaaaacaaaacaaaaaacctagatggtagagcctttgacacacctaagctataagctatgtggtctagcctattgctcctaggctatgagcctgtgcagcatgttactgtactgaacactagaggcaactgtaatatatggtaaatatttgtatatctaaaagatacagagagtgaggtttctaaatttggaactcctactcactaaaccctcattcccctgcacaccatttgcccttcagcgtttctataaagccccctacaaaagtttggaaaagtgccagaatggaggaccagatgcctggattccatttccaccatactagctggccagtggcaatttacttaactgctggggacctcgacggcttcatgtttatttgtttgtttatttttttgagacagggtctcactctgtcacccaggctggagtgcagtggcacgatcatggcttgctgcagcctcaacctccccaggctcaggtgatcctcctacctcaacttcctacatagctgagaccacaggtgtgcaccaccatgcccggctaatttttgtattttttgtagagacttggtctcactgtgttgcccaggctggtctcgaactcctgggctcaagcaattggcccacctcagcctcccaaagtgctgggattatacaggcgagagccactgcactggtttgcttcatctttaaaagaggataataatgactttgctaggagggagaggggctaccttgaggtcatctgtagcattaggattataataaggtcttagaacacatgattaacatgtgacaggtctacggctaagggacagacattgtgatgcaggggcttgtatactgggtgatgctgtaattagtgattccagggtgaacagaagcaacagccctggggtggtggatatgccaatataaagatattcttgccctcagccacaaagtaagaaaccaagattatggtcacgctgagctgctcttctttgtgtttcattatctaaattatgtttgaaaggtagatgttttcagactaatacttggtaatgtacctaaatgtaagctatttttcccttatgtagaatcttttgctgttgttatatatttgactattacagtgaaaataataaaaagcactgtttatgtgaaacacagcaccatcttgcagcctactgttttattctttaacaaaagatgtctattctataatggttgggactagaaagagacaatttccataaattgttgttatttatttaatgtcagttttttttctaagctctcagtcttctgagaaatccttctaacagattctttttgaagtacaaattaaacttctgactctcttcacaacaacattctaatctagaccaaacaatcagtcacttttctaagtattcaaatcctaaatcaatcaactgctgacactttttttataaaaatgagaataaagcacatatggtgacactattttcagttctcatttttttctctaaagatttagatttagtcatataatttctcttgatattcacttatttttacgtgcttatttagaagcagaatttgtttgaagtcatggaactttcctgcaggtgtttttccactatgatttttttaaagctgtagatatcaaaagtatattaagatagcaacaaacattacatctttcaaaattaatggagctgtgcattgaattcagagtttagtttgtagcttggttgcagctctcttgctcttagctcctcctacttgagaatttagaattcatttgctatgctctaggttaatatttatggaacagatacattcaactgcttacttgttaagaccactgcattgtctgaaggagaaattgacaactctgcaacatcttcctcatttttcacaggtgagtaacgcaccaggaagttggttaaatcaatggatgggggtggagcccaggtgacacgcatggtgtctggaccaatgttggtgaatcgcaggtcagtgggaggaggaacagctggtttcgaacaagaaggaagactcagttaatgtaattttaaaattaaagctaacgaagtagctggaaaggtaaaaccaatatttcatgcataaaggaaacagaatcataatcatgcaaacagtctaatctaagtctattttaagttatagtgtactactgttaaaaacaaaacactacacacagtactgttaggccccctttaacctttttgccatcattgatatatttaaaaaaaattttaatctactttcaaatatgttgactttatgtacattattaataccactgcagattattttatcccaggccgaagaggcttaagttgccacacagcaaagagaaacatagcagtactttacaaagaaatacatgcacacagacaaaaagacaagagggtcctaaacttccccccatgtgagatatctagagctacagttccattcagtgaattctacttacaagtgaacatgttcatgcaaattggttctcagcatgtttcttttcccatgcacagcagagaacctttaaaatgttgcatgcttgtccccagactgtggttaaagaggtgtttctttacctagtgacagcaacaaaacctagaatgctcccaagtttacttttctcctacctcaaaacaatgcccatccactctaccctaaattttgatgggtttttagctacaaagaaggagcatggtagagtttatcaaagggtagaaggaagagcatgatggtacattttggtgatatatttcttataattaattggtacttacgcaatttggtattcgtgtttggtatttaagaagaaaaattctaggtcttcaaattgaatgaacatttgctattttatatttaacagagcagacatctgtatttctctagctttatatctacttgtggtttaaatgagagtgtactgaagaatacttgcatgtgtttttctccaatcagtttagcagatgcatttgattccttatccccccaatccaccctatctgaatctttggccaattgctgacttcccccatgaaacatccatatttaaccggagtaactggtggcagcatgcaacaccatctatgtctcaaacgcagaagttttcaaaattcacccgtttgttgtgtcagtgtagtaggggcactctcgccgccattaatgagagtgataacgctgatatcatagtcaatgcccggctccagccctgtgactgtgtagtatcctactgaggagtccacaaaatcttcaaaaatagggataccttctcctgccgcaactactgtgatgcggtacccaataatggtggaagagtttagcggggtccacctcaggccgatgcttgaatcggttatatcaacaaagcttaggtcagtgagttggggcacctctattgagttacaaagcaaagggagggggaggcaaaaggaaaatagagggaaaaaaagaggaaaaaataaagcagtgtatatcaggttactagtagtaaaattggtggaatgttaaagcaatgatggtaatatgcaatctgttttaaattctctgaaaagacttcctaagcatcatgaacagtttgcttccctagaagaataaacaggaatattcttttagggaatatatatatatatatatattttttacattttgaaaacatccttaaagggtacaatttgaactgttcagattcctaaaaatcatatggctgtttaggatgtcgaaaccattcttagagcctagacataatatctgaagtaagtatcagcaatgcttttaataattccaaaactgttttagtagaaaataagcttgcatgaagaaggttaaaaaataataaatgggtgataaattgattttttttctcccatacaaaactcatgacaacatcatggccataacgctaatgcattatgaatgtatggtgtgaaatgtgccattcaaaagcacattcaggctgaggaaagacaggcctaaggttaaggccattgccactattttagttcattcataatcaaaacatgtaattagcgttagtaaaagcattctactgaagagtccaaagggggacacgatctgtccaatgctttcattatgttataacccaatggacaaacaagcctatccttagacaggcctttgcaatgttgtctttcaagccacaagaaagaacaccctgaaggtgtgacttttacttcttttttttaaaatccaattttcaaaaagaaggatttgaaactgcaagatgaaaaactagatgtgtcaaccaaatgctgtttcagtgctcacatacagggacaaaactattttataggcagctgttggaaattgatatggattgtaaaatcgggcagaaatgtactgatgggatgcatttaccatattactttgagcctatcagtactgagtacagacacgtgacagtgttttagtcatacttccatgtgagcagacaatacagagttaaagccatggctgccactccattacatactcgctgcaacacacagcatcccagtgaagcacagacagtaaagcagtgttaacagcaagcatttgtccaaatcgctgctttgacttcttggttttggaaagtgcagctgggagatcggaattaaatcccaaatatagttgacacccttaagcatctggggattaagatgctaatccccactcttattggaagtgtcactctcaggatagcagcttatttttctattacctgggatgatggtatcagagatagggacactttccttgtcatccttgacagtgtaaacactgacattgtactccaggccgggactcaggttatcaaaagtgcaggagctctgatcagcatggaccacttcttccaaagaatttccctgctggccgtttgtaggggttgtggtaattctataaccagtaatgtctggagaaaaaagaaaagggaagttattgcacagaggatctgtgagccagagcatatttaactagactccaatgatggattcacagggcggaatgcaggacttggcatttactgaggactccactgtcactgttattcaatgcttgcaacaatcctttcaggcagtactaagatcctcactttatttttttatttttattttttgagacagtctccctctatcacccaggctggagtgcagcggtgtgatcttggctcacttcaacctccgccaagatcctcactttaaaggaaatcttgaaccaggggagtgattccccaaagctttctttgtttccaaatctcatggtcctatcactgtaccctgcttttccttaatgaatcatttgaagacagctgaggaatattcctttctacctgcctagtatagaatcgttctccaccttaagcacattccccagagagctctcctaatttaaaaggtctgaaactatgggatttataggaagagaaccaagaaaggagaaaaggtgagaaacaaaagtggtgatacttattctagaaagagtattgattgggaggttgaggcaggcagatcacctgaggttgggagttcgagaccagcctggccaacacggtaaaaccctgtctctactaaaaatctaaaaaatagctgggcttggtggcgcatgtctgtagtcccagctacttggggaggctgaggcacgagaatcgcttgagcccaggagacggaggttgcagtgagttgagatggcgccactgcactccaagcctgggtgacagagtgagactctgtctcaaaaaaaaaaacaaaacaaacaaaaaaagagagtattgattgttgaagtcttcaggaatcacagaaattgggcagtaaaagagttgagagggatgagagacattcaaataaaaacagtgatgactagagatctgtggggacagattaaaatgagaaagtatattaaactttataaaaggcaaggagatgacagaatattttgccattaggaacagggtaaacactaatgtggcaaatacaaggaaacccaactgaatgagaaataaatattgagatcattacacttgctagtggtcatccatatgtgtgggctgggccattgagacgagatattaatgatcctgctgctaacaagcacgaagattgtcaacttaaagtttcaaattcagagcaactcagctggaaattgtatagctttggcttaaacaatgtttccgcagataatgaaaactttaccaaaatcactctacttcagagggagattaaaagagatattctgagctagtttcattctgtgtgtttgcatacattaatcagatttagagatgatagccttagctctgtgccccggcaaagataagaactatataatacttttttttaaacaaaaatttcacaagaattttacagtaaaattagaaatagctaaataataacctaaacatatcccttaaattaacaagtatatgaggtaagaatgcaatcaacattaattggaacttttatttttgtttaagatttttctccataggtttgttgagacttccatgtggttttggcaaaagtaatgggtatctaaaatttcctgttattgctatagtacatcatgctgtttgaatattgttaacaactatctttatacattttagcattttataaataattttcaaatatatgtgaacaaggaatttagacaaatgcttcatttaaagctctaaaaatggtcaggaaaccccttaatcagaattttcagtttgcatagaatataattaaaaaaaaattacattccaaatatgtgacattgggtgtgagaaggagtctacaaacttaagttacaatcccagttttgtaacatttaaaatgtgtgactatgagtaggccaattttttctaagtctcagttttcttattctgtaaaatgaaggtatttctgcctttcatcacccttaaatatttgtggtgcaacccatgacaaaacattcataaaacttcagggaataataaacttaggctctgtaacaactcacaaaagggaaattacgtaatatgacttcaaccatttgtttggcaatttttaatgcactcagcaaaagccaccttccacagtgcttttcttcagccctacagctgtgtgaggatctgtcttgtccccctagactagtgtaaggttgttctgcttcctgtgattgaagtcaacgtgcattaaagcatcctgcaggctgctccatgatgtacatcatgtactgctatagtttttatggagagctaagcatttgtaatttgaatcccttctttctctgaaagaaacacagtttctaaaatctttgtcttgggaaggtatggtgtatacttgccctctgatccatcccaaacttacctggggtggtgctcctctcccaggagactgtgagcactccagtgtcagggtttgcctccagatgcaagtttgttggtggagacaatgctatgcagaaagaacattttaaaagtcaaagctgacacaaagctcttgacctgtgtaatctttcctccttccctacctccctctcttccatgcttcttccctccctccctccctcccataaaaatataggttacattatgaaaatatgatggacagcagtaattctctgacaaagacttctttatgattaatgattttgcaatactattgaaattattttcatcttgccagttcataaatattcttgacatggaaagaacatttctgatgccataaaatataaagcatgaattgaacctgctactccaaattcaggaatagcattaataatataagtaaggataagatatctcccctgtgccattctcataagtaaaaagtgatattgacactagcttttttcgaaaagtagaacagttttaaaaactaatagaaaagggaaaaaattcttcttacgtgtcaccactttgtttacaattggcgcatctctttcctgtccatctctcaggacttggatggtgtagacgtattctactcctggagtcaagccggacacaacgatgcttcctgagtctgaagtcacttctcgtggtgcctctcctccctggcttggtcgtacacccagctagaggaaggaatgcaaagtaaacaccaaggacaaatatttccagaggactgttactgctgtgaggctatgattatgctttaaatagtgtaaactcttcagaaactgcacagtgtacttttattgggaaatgatttggggactcttttatatactttagctggaaattcccccaggtgggggaggtatcttccaaactgcattaaggtggcttgtaatggaaggttccagagaaatgtcattacatactgttttgcttgataaagaatctcttgttacaaaccagacgtatacagggactgtgggtcacatggtagttcatttctatttttctgtgtgtgtgctagaaggaatgtctgagctctccctttaacgagttattcacattcaattaaccttttagttgccatttaaaggcaccagcccctgtagcaactgtattgcaaaaacacaccttttgaagagatatgtacatagcttcaactgcaggatgatacattacaagagaagaattagaataactatgcccataatttaaaatccttttaagattctatttcaaaaacttaggtaacactgttatccaatagtgttcaactctagagagatccttcacacatcataaggcttctgaaagtcagcatgacattattaagggaattaaaaggtatactggcactcttcagaaagttcttctatatttgagtagcataatcataaatatggccatttacaaactttatctttggtgtatttttttaaacaatcaaggggattgagtcatgatttccagcgataacaaatatttctctcttcacactaaatgccaaagaatggaattcttttaaacatattcatttgtattcaccgcttccctaatatcattactttaaagaagatgaatccagatatccacagggaaaccttaatcttaacttctattaagagattcaccctcagtgctttgaacagttggagatgaaactgattggatgaaaatgcgatttttaagtgactctgagtttaactggtctccctaaactggcttttgtgaacttgttcacactcatttagaacaacacatcaaataaagttttcccatgtttttttgaaatgtaattccctgcaggaaagaatagagaaaataagataacaataagcagcagcttcgtgctaatgttttatcctttgcaaaacactttcgcagcctccatctacccttccaacaattcagtgaggtaggcagggaaggactgttaggccctgacaatgtagtcaaagatgtatggacagaagcaggtgacaaaacccaggtctcctgactcctgagcaccctgtttccactacatgggaaacacaaggacagcttcagggctgtatcacagagattaggaacatctgcagtttaccttaaaaccaattcttggagcaggcgtccatgtgatcacaatggtggtctcagtcacctcggtgttgtaaggtggaatagagctcccaggctgcactgtgagagagaatcaatgcacatattcaaaactcaaactcacagatgattgcatagcatatagataacaagtatttttatggagaacctcagtttaaccaagcagtggatagaggatgtaacatattttttcattgggtgagaattgggagaggatcaggcttctcaatctttaatgtgccacacacatcatctggggtctggctaaaatgcagattctgtttctggaggtccaacaaaaaactagggagtttgcatttctgacaaacacagataataccaattctgctggcccgtgaatgatacctgagtaacaaggggttagatgtttgctaaggtggtcctttcattgaaattatataatctaattcatgtctttttatgattgttgggatttgactttgatgacaataaatttccctatatcgtcagtgtaaaatcccttataaaatgtaaaactggccaccacaaactgattatcatattgtttcttaaccattaatttaagaacaatggtaaattatagaaggtgatctaaaaacagctttatgctgggcggggatcggtggctcatgactgtaatcccagcactttgggaagccgaggtgggtggatcacttgaggtcaggagttcgagaccaggctggcaaacatggtgaaaccctgtctctattaaaaatatgaaaaattaactgtcatggtggctcatgcctgtagtcccagcttcttgggaggctgagacacaagaatcgcttgaaccctggagatagaagttgcagtgagccgagatcatgccattgcactccagcctgggtgacagaatgagactccgtctcaaaaaaagaaaaaaaaaaagctttacgctgaattattccacaataatggtcagctatttttggttgcaataaaagatgctatataaaagttaaacaaaatctgccaccatggatgcactttgaagtctaaagatttgtactttaaatacgtgattattctttcagaataatactgcaaaaatttagtattttatcaccagaatcaggaattataacaaatttattttgcattttctagcatcctgacatcactgttatttttcttattgaaaatattactttggccaggcgcagtggctcatgcctgtaatcccagcactttgggaggctgatgtaggtgaatcacttgaggccaggagttcaagaccaacctggccaacatggtgaaaccttgtctctgctaaaaatataaaaattagccaggtgtgatggtggatgcctgtaatcctagctgcttgggaagctgaggcaggagaatcacctgaacctgggagatggaggtttcagtgagccaagatcacaccactgcactccagccagggtgagagagcaaggctccatctcaaaaaaaaaaaaaaaaaaaaaaaagaaagaaaataaaattttacttaaacaattttttttttgagatggactcttgctctgtcacccaggctggagtgcagtggcgcaatctcatctcactgtaacctcagcctcctgggttcaagtgattctcctgcctcagactcccaagtagctgggactacagttgcccaccaccacatccagctaatttttgtatttttagtaaagatggggtttcactatgttggccaggccagtctcgaactcctgaccttaggtgatctacccacctcggcctcccaaagtgctggaattacaggcatgagccatcacacctggccaaaaaaaaaaaaaatcttatttttaaataaaagatttgttttgggttttagcaccaaaaataagaaagaaagagagagagagtgagagagaaagaaagaaaagaaagaaagaaagaaagaaagaaagaaagaaagaaagaaagaaaggaaggaaggaaggaaaggaaaggaaaggaagaaaagagagagagaaaggaaggaaggaaggaaagagaaagaaagaaagggaaaggaaaggaaagaaaaagaaagaaagaggcatgtatatataaagttaagatagagatttccaacaaccttgcaaatcttattataaatgtagaaaggtaagatcgcagaaggccagatattttgagttgggtaagtttaagttcaagggtatcaagtgtgttaatagctctggtcacatgtttgacatctccacaattcttcctctctttacatctcaatcaaattttgttcccattgggaaaaaacctctgaatgcatttatactaaattatgaatggctggcaagacaaagaattagtctccagagttatacaaacagggattaaaaagtgttcagactccagtctcaactcaactccagtcaatttttttttctttgccatgtgggaatttagaatcaacatcgcaattctcgcatttttttttcagtctggattctaaggagccattttttatttttattttaaaaatattgtgtgagaaaaagccaaatatatgtgtgggccacttcataatgatagctctaatggctgaattgaggtactactggtttagtgggctgtttcatctatgtatgttattattttgatggtgtttggtggggggtggggggacatgactgggatgggtgacccgatgccttttagtacctctgaaattatacaccacttgactgctggtgactgtgccaaaatgccatggccagccctgtgtgaccatttttaatggcccacaaaaaacaattcagagaacagtcagtttctttcactgaacatctgtgaaaaccacaactttttttacaaattatattcgcctcaactgtcctgggctttaagactaggtattttctattgcttgagccagccacctagagtcttcccaagtttaagatgatgctctctgcctgggaaggccattatgggaaaatcaccaaaccacaaacccacaaacgatgtcaaacaaaggatgtgattctaagtgtgagctatgggttctggcaggtcttgttagggaagaacagcccagctgttaaagaaataaaatttgccctatcaatataagactaagctgaattttccccagaaacagctttttcccctaacttttctcacatttgctcttaagaatttagcacaagttataaaactcagaaaagttactcccagaattcagcttagtaagatagtaaaaaactacagaaatttagtaatttcaaaaacatgcaagccttgtggatgtttacagccttagggagtgcttaaagttcaaatggagttgtagaataccctgcttacattagtttatttaaatataagcttcatttagctgtttttattattattcctttctcaattatctattcaccaaatagtttttgaaagcatacaatgttccagacactatgttaacctttatctaataaaattagttttggctatcagtacttcagttaaaatcattatattttatatgaatgtattatgcaaagcataaaataatatatccaatatatcagtcttcagaagtacttgaaatatcttggcccaccaccttcccttaattattgttagcatcattaaaaatgctttttcttttataagcactgtgttcaacaaaagaaactacataaaatatgtctcatgttaaggaatgaacaagacaactatagaattctacattttagtaaaagacgacatctactgaaagggcgcattcactgaaatctccattctaattcactgaaggacatttataagaaatgaatatttacaagaaatataaagacattaatttcatgagagtagatcttagactatcttagaaccgtgtaaaattttagccaaattttcaagtaagcttatttgcaaattaaaagtgaattttacttgcttacgattaactattatttaggaaaaagccttcatgagccaaacttcatacagtaaatttaaatggaagtaagtttttcttaaagtatgaattcttatggggaaaagtttgtattttctttgggaaatcaattccatagttatttacaaactaggcttgtatggactttttgaatgctttttaacatccatacttttaaattagtcgaagagtaacatttgttgaaagctcttagaaaattgcaaactagtccatggttagaatatatgctgaaaaagtacttatgttaggtgcttctataattcaaaatgtcgagttgaaaataacaaatgatgttcagctagaaataaggagtctcataattctctgtaatgtaaatggaaatgtatttaataggaatcggtttgtgaatagaggttgttattgtgatgtagatatgtgggagatttaagaccacttcctttaaaatgttgagcaaaaggatagacataaccaaaaattattgttagtatttttctcctctgaggaatttcaagagtaatttaagaaaagagcgattccgtctgcaaaagtactttaatcttctgcagccaacactcataaagaaatcatttccttggcttcatgttcaattagttggttcccattcaatccatagatatttttattctgcatttatagttactattcaatgcccaaagtaatagaatgtagacataggtgctaattttttcttgcgttaactagtgtttggtaaattcatttaatgtaatcgaatttaatttttctaataacagactgctttaaacccatgttactcaaagtgctggccctagaggaaagagcgagcttggcaatgtgtgcaaattaacacactgcttccttcatcaagaaaatctggcttcagaaaaattctcagctgtactaagcagtgtgctttgtgatttacgttctggcacaaccgtttttcttgttgcagactagcagcaaacaattaacgggccagcagccagtctatggagcacatttttagtatcactgatttaaattatgtactaattttttaatgttttttttgttttgttttgttttgttttaaagcatgaagaatagagaatgtaaatatagttaagaaaaggcacttaattttcagcttacgtgtggtaaagactccagtggctttggggctctcttggttgccctttatggccacgagggatacggtgtactcagatgcaggctgcagattcctcagtgggtacttggagacagagggacccacattgtactgcctgggctgtcctcttcgggtaaggcccacggtcagtcggtatcctgttatctgggcccgaggtggagtccatctcaccaggacagtagaatcagtttcattgacaaactggaggttagtgggagcatccagttctaggaaaaaagatgaaacatgccaagaaatatttagatcagtaatgatcataactcaagtcctgaaacttgattgaatgtctaagttttctctcctcaaggttgtaactatgtgaaagtcaaaaccctggaaaaactgagccagtaagagattgagtgctacacaaaactttgccaaaactctgccagtcatgagaaattgtggaaccattttgcttgactgtgatcctttgggaagtctaattttccagcaagactttcgcatcagtctcagaaattatagttacattaaagcaatggtatttttaaaaaggcaaaacaaacacttctgaagttcacagttagctctgagccaaacagattaaggaaaaagggatatgcctcctaaaatgacagcaagaagaagctctctatgggtcaaaagcaatattctgtgaatagccctttgctagagaaataaaagttattttcacatggttcagattagacagtaattacagtaatgataacgtatcctcagattcatggtaggatactggtgagtttgcactatcagaatcacataagttgtggagtttattcttgagaataataaccagcagttttcccaccgaaatttaaattacctttcaaatagaggaaatctttaagaggcagtcgagtataataattgagagcatgggcttcggacataggttatagagccagctctatcccttcctatctctgtgaccctacaagttgcagaacttttttaaagcctcagtttctttaagtattcaatacggatactagtaagaccttccggctgggcacgatggctcacgcctgtaatcccagcactttgggaggccaaagtgggtggatcacttgaggtcaggagtttcagaccagcttggccaacacagcgaaacccatttctactaaaaacacaaaaattagcagggcatggtggcacacgcctgtagtcccagctactcgggaggctgaggcaggagaattgcttgaacccaggtggtagaggttccagtgagctgagatggtgccactgtactccagccctggcgacagagcgagactccatctcaaaaaaataaataaataaaataataataataagaccttccttcctaaggtcaaaacaaagagtaaatatgagaataatgcttgtaaaaactgagcagataagctggtggctagtaatactagacacttgacaattgctattgttaaatgaattctactctaagtgttatgatcctgcattttaactttgatctagatatatttagttacacgaaaaatgcactcaaattagattctcttcagttctcccctcttagtacccttcagctggtacatgtattttagaaatgggttaccacttagcatccatggagcttgtctgagttttgttttcaagtttaatgtgctttgtgttcactatgcattcccttgccggctgggtatttccctctctctaagccatacacctctgagtgaatggtttactgcactttctcacaggctgcaagtgagggtggagaatttggaggggagatagagataggagaagacatactggttgtctgttgagcagtcagaggcttgctctccctcccatggctcactgcaaagactttgaagtaataggtgaccccaggggacagcccggtgacttctgcaaaggtgttcctgctgatgggcagcctctgcccgtgctcgccaggcaggttgacggggatcacatccacacggtagccggtcactgcactctcaggcggtgtccacatgatggtgaccttcacgtctgtcacttccacaaactgcaggtccctgggagagggcactgtatctgacagacaagagtcaactggtcattcacattctctgctgaagattacttttaagaagccagtttcttggatatgttaggcagttcattgagcctctcattcgagagttttgctaagttttgtctcttaatcagatcacattttcatggtccagtcatagtgcttaaattatgacatttgaaccttttatctaaaataggtaataagtgagttaccagcatatgaagtgtcatatggtggtggggggagagggttataagaaaagatactaaaaaattttttagaaaaagcctttgaaataactgcagaaaataatgtaacagtttttgttttactgaatcattttataatacttaagaatcaaaaatgaaatgacccttaagcttctaggggaaaatttgtagatggacgttatggtgtcagtttttaatcagaaaggccagtagccagctttgataagttacttatgacatttcagctaaatatcagaagtttagggaaaaactaatatataagatttcttgaatgagaggactgttgacagagacaaaacaaccctccttcaggaacaatcctgataagataacataggaagtgtcttcttaaaaaagttacctgagcgtggggtgccagtggtttcttgttgaatgacaacaggtgtactttcttgattttcttccacagcatagatagtgatgttatactgaacaccaggttgcaagtcactgagggtgacggagtttgcagtttcaggaaggttgagttctgtgctgctaccttctactgatggcgaatagactattctgtaccctgcagattcatgagcaaaagtaagatgcactgttttctttgagacagaggcttagaaacaccataaatcctcccttttctaatatcccttagcatcttgcttgattagtgaagagccagtgatactttttgactctttgaatattgccacttcttctaataatgactattcagcacgaagataaaataagaacagtcatgcgaacctttttaataataaatgtcatccttgaagacctgacatccttaataaatgtcaattagagatgccattaggtgaaaatattcatgttaagctgatttttcctctttgagctccagacgagggaagcaattaatgaaccagcctaagcagagttgtctagcactgtgtgtgtctttttggaacttcagtgatgaggcagttgaatcacctaatgagctaagacgacagctcagctttctccttaaggataaatcttagagcaacgttttcaggaaattacacctcttcaaccctgggaacacttgctttaataagccaatgagctggctttacaggttgtgtgtatgttgtggtgtgtgtgtataagggagttggtgaaatggtttcaaggggaaatgtgccatagaaaataactcccccacccccgccaccacacacacacacacacacacaaacccctctcccataaattatattggagatttaaagtgatatgcaggtccgcagtcagaatctgcgccctccctgctgatgtcattaagattaacatagcagccaaagagggggaggcttagctgacctgtgatgggagcctggggtctgctccagcgaacaacaattgaggtgtcatcaacttggtccacagtcgggtcaggtggggcatcaggcgctaagaaagaaagaaagtggggcaaacagtcaggaagtgctactacaggcctgtgttttacagaaaaagattcttttaacactatgtagcacacatgtacctgttgtttgtgaagtagacaggatcaaactctgctccccatcctcagatatctgatagacatttacaatgtattttcggccaggaagcaggtcagggatgttcacagaagtggctgtgcttggaagatctttgaaatgaaaagaaaaggtaactaatcagagcaaactagtccctcaaatgactctacagcttataagaaggatattttaagaattatatattcatagggaaaagcgactagaaggtaatgtgctaatagctaatcagtgattattattattatttttacacagagtcttgctgtgttgcccaggctggagtgcagtggcacaatttcagctcactgcatcctctacctttccggttcaagcaattcttctgcctcggcctcccgagtagctgggattacaggtgcacaccaccacacccggctattttttttgcatttttattagagatggaggttcaccatgttggccaggctgatctcgaactcctggcctcaagtgatccaccagcctcagcttcccgaagtgctgagattataggagttagccaccgcacccacctaatctgtgattattaatgtactatgggaaaaccccacttcttgtctttctcctttctcctcctcctccttcttcctttcatttttccaactttttttctaaagacgtataatttttgtaatcgaatgccaaatttttaaaaatagctctctgcagtaagagtcagggtagtgattattggcggaagatgatggggtgagggtagagagatattctttttcttgatctgggtgctggtcttgtggtgtgttcactttataagaattcaaattcactgaactcagtgcttacgatggcacacacttcagtgcgccaatgaagttttttaaaggcccctcaccataacaatttgaaaagtatgagtgaccgtactgtgctcacattgtcagctgcagtcctggtaattacttccaccaagaacacagcttttgctgtaggaacttgtgcacaggtaggcgcatgatgcagctggcatcagggaccaggaacatgtgacagtggcttgggaaaaacccggccacttcttagaaagagtcagtccttcccttcctcatgccagagggtggtttgttcagtctgagctgtcaaccagttccaaaccacagataccacctgcctagaggccacccacccccacaaggagagttttccagcagctgccctgaacctgtcttgagcgacatattgagcttacccaggtactgtggctcatctccctcctcactcagctcatattccacccggaatcccgacacggtgtcggaagctgagacccaggagaccacaaagctactggctgtgatttcggtcacagattcagaagtggccacaagaggagaaaagggagtcgtctctcctgtcacggtgttgcctagagagtcacagaaaggggaaagtcagccttcagtcatctagaaaatttaccgtcctcgtcgccaacatcattttaaaaaacgttggtgcccctcctggaagaatatgaattgagaaggaaagcattgcctcaggagagcctagctctaggaacctcgggggtaggaggcatgagggtggttgtgtacatactggtcacaggtgtgctggtgctggtggtggtgaagtcaaagcgagtcacttcttggtggccgtactgctggatgctgatgagctggccctcgtataccacaccaggcttcaggcctttgatggtgtaggagtttaagtggcctggtatggtagcttccttccaacggcctacagaatttttctgaaaatttaaattaacacacacacacacacacacgtgtttacaaggatgaacatttgaagatgatgttcagtaatcttcaaagaaaaatgacttaagcaggacttaggcagctccattctagaggaaaatcatggaaaactggattcccaatggttatatcgttagatatagttagatataatgctaactattgttaacatcaacaaactgctgcagtttacttactgatacccatactctgtgctgtttacctacattctcccatttagtctccatatccttctgatgataaggcaatggcattgttgctcccgttttacagacggaaaaacagagtgatatgtgatatgcccggggtgacatagttgcagacactgggcaccttcactttttttttttttttttgagacagagtttcgctcttgttgcccaggctagagtgcagtggctcaatctcagctcactgcaaactccacctcccaggtttaagcgcttctcctgcctcagcctcccgagtagctgggattagaggcgtgtgccaccatgcctggctaattttatatttttagtagagatggggtttctccatgttggtcaggctggtctcgaactcccgacctcaggtgatccacccgcctcggactcccaaagtgctgggattacaagcgtgagccaccacgcccacccacaccttcacttttaccaagttaattgtgttatatcagtaacataatatgatgaacctaagctttgcctctctcacttattttttattcctaccacaaacagatatattcctctctgaagtacagaaatgccaatgccatatattttatcttttaactcagtgggatacaattcaagtttcttgtcctgaaaaaacaaaggcagaatgttgctttgtgactcatcatataccaggttcaacaagtctggttttgtgactcattcttggatatgagctaccccatcagaagtggttacccaattttggacaagactacagaaaaaatgcaattttggtttatttaatcttttgcttccagtttatatttcacatcctgttcagcttcattaatatgccatgggtcacaaaactcagtgcaataaaatgtgtatgaaagaaacacccttcagaaaagatgagactctttcaagtgtaaatactctaaactaatataagtcaaaatatattttttatgcccagtgatttttaaaaattacccagtcaaccatttcctcaataattcaaatactcaagtgtccatttatatttttggaataagcgagagtgatcgtagtactcttcacagtgaaattttaactcaaatacactgtggaaaattttgaaaccagtcattgcaattagctcaaatttagtaatcatttttcaacatgagcttgtttggttagttattacaagaaaataacagaaaataaagtctcaggtggcatccattagaaaaaaccctgaatttttgtaattgttaaaaatctcaaaaaattcatcactgctgctttttgaagacttttcaattcaatgtactttttttttttttttttgagatggagtttcgctcttgttgcccaggctggagtgcagtggcgtgatcctggctcactgcaacctccgccttctggtttcaagcgattctcctgcctcagcttcccgagtagctgggattacaggtatgcgccaccatgcccagctaatttttttgtatttttaatagagacggggtttcaccatgttggccaggatgctctcgatctcttgacctcgtgatccgcccaccttggcctcccaaagtgctgggattacaggcgtgagccactgcgcctggcccaaagtacattttataccacttttaagtctcccattgcaatggtctcacataatactttggatatccttaattttaaagtaaataaaattaatgatgtaataagaagatgagagactagaagatattggatgcactgatgctgttgatttcgatcactggacatcaagttctgcaaatggccagattatggacatagggtgaaagaagaaaaagaatgacttttcttttttttttttcattcaccatttgttaagcagtgtgccaggtgctgaagcattctagactctacggagactacactgagccaatgagaaagacacgattcccctctttaagggaatctgtttccattttctattattctggtcttgcctccatgtagacaacatgcttacacctctatttgtttcatttgtcaacaataagtcatatttacagagtctttaatatgagacttgatgatttatttatatatttatttatgttgacacagggtctttctctgtctcccaggctggagtgcagtagtgccatcttggctcactgcaacttccgcctctcaagctcaagcgatccttccgcctcagcctcccaagtagctgggactacaggtgcatgctaccatgcccggctaatttttagccactgtgcccagacaaagttgaggatttagctcaataataccaccctttccttccagaatcttggacattcccagtgtctgacatttgtatcattatatttgttcttcttgtgtttatatttgtaatttaaagtattatattaagtatctttttttttttttttttttttttacttcatcagcttttggtaccatctctcaattctctattttgaaagataaagctgttatctcctctcttctccaccttccatatccaccatttttcatgtaaatgtttactttttattttgtcttgaagttgcaaccaagtttccatgacacatctatagaccgatcgcatcatgcattagaaatacattcttttcaatgagtctaacatcatgactgctgggtggatcaaagtttccagaatcaaggttcaatggaattattcctctttgtttttataccttaatattgctgcattttagtttgcttcgtataggaattattgccttataatacacttgggggttttttgaaacagaatctcgctctgttgcccaggctagggtgcaatggcgcgatcttggctcaactccctgcaccctttgcctcctgggttcaagtgattctcctacctcagctcctgaggagctgggactacaggcgtgcgcccccaagcctggctaatttttgtatttttagtagagacggggtttcgccatgttggccaagctggtctcgaactcctgacctcaggtaatctgcccggcttggcctcccaaagtgctgggattacaggtgtgagccactctacccagccacatttgggtttattatacattcctccacctgattgtcatgttgttattttaactgcattatttgcccctgtgattaattatccacaagcctactttttccatgaagtccctttttattcttggagacctcaatccctgatccctcaatcccatcctcatctttctgttccatctgtattggctgtcctctaagccagctacgcagttgttgcattgcaaagttttccacctctatcaggggtctgatttggaagcactgtttgctggaccccacaacttccttcatatttcactcttgtttttctggagtgtatctacaaatacccttaaagaaaaggatatatggaagatacactgcctaaaatctgtctgaaaatattattttgccctcatatttgattgataacctggctgagtatagaagactttaaaagtttctttttatccttggaactctgacacatcaaagatgcgtctagacgtggttctttccactaattttctgggcacctaggaggcccttttaaatctgaaaaattctgtccctccactttagaaatttagaaaaagaataattttaacagcttaaatttttcctgaagagtttaaatttaaccgcctgggttggtcaaattttgtttgtttgtttctttgtaattgtagaattcaatagctatgatttaaaatggacatttttttctcctgtgtttaaaacagtgtttctcaaattatgagccatgaactttggagttaaacagggcaggcttgagagagtaagagaaactaaagctaaattgaccaatatcctccttatttggtttcttcaatttctagtcacttctcattaggaaatcacagggctattgtttaaataaaaccaacttccatcctttatctaaacttccctcccatcatctcttttccttctatctaaataaattcagtgggtcaaaagtaaagttttaaaaatgatcacttaaaaagtgaatcaaaaaagaaatatattaatttggctttttttttcaaattatgaaaatgatgccagtaattttcctttgatgaggttgcaagacatataaaaaccttagattctcttcccacattgggcaagaacaatcttaagcattatcatttctaagtccttgcaaaaaagatttctgtaacataaagagctaaattcttccaaataccagcccccccaccgcaaaaaaacaaaacccaaaaccaaaaccaaaatcccctcagtctacaagtcaatttaattgaccacatattgtttgttcactaaacaaatatagtaaatgctataggaatagttaatcagagttgttggctcaaaagctgggaaaaaaagaaaccatcagaattgataagattaggagactcagtatccaaggtttctgggtgggatactcacaggtctccacctgagaatgtacttggaaatgtgagatggctgtggtgcattccactggatggggtgggagttgggctgactcggagtctcagtgataaatacttcgacaggaccacttgagcctgaaaatgaaaatgtagcatttaattatcttgaatattcactcacttcaacttaaaactgtgtacatggacagtcatcattataaacagctttgcttgtcgttaaatgtgagtataataaaattatctggcattaatcttttaaatatttacgttgaaaatcaatgcagcaaatccatttttagccgataattattattcttcacatgagaaatgcaaatcatagttgtttatagcaaataaaatatatttttaaaaaaaagtctcttggcttgcttttattttctctactatcaaagtaagaattgtgagaaaattgtgaaacgatcctacaaaaataatgtaatacagaacacagacttcatttacttattgtattgagcctcttttaaagcaaattctaattttggaaggttttcatcaagaatgaatctactacctaagaaggaaacaacattccaaaggccatatgagatgatgtaaaacaaacacatttctaaatgggggtagaatcttagacaaatagcaaaggtaataattaaagacctagttttatttctcatcagtctaagcagtctatcagtttggaaaaaacatcaagttttatttttattcaagaagtttactcccaaatcacaccattgatccatcaaattattaagtgattaaatttattttttttccaaaatcagttgtcaacagaaatgactttatgaagtgtatactaaattcagtatttctacaccttgatgtatatcactgttatcaacaaaatttaaagtatggttttggttcttttgtttaaaataaaaggaaaataagggaagtagcatcaatttcaaagtagtgttaactccatttaagataataatgaaatagctagaaaatttatgcttgcagaacagaaaactatcttttcttaaaacactatctttatgatgtcagtcaatgtttaaattactagaaataaaaattgtgtcttatagtaaccttttcaagaatttctaactgacactctgtcaaacagagcaaaattttgcatgtgtaataaagcacttcaccagattattaacagatttaagttttctgaaagcttctaggaaaaaaaatacattgattttcaaactttattatctaagccattaaattctcttggaaaacaaagctttctgtagcagaaaaaatatataacttggatatccatgtagattcagaaattctaaaacaatatgctcacttccacaccagtaacaattcaaagttggttgaagattagcaaatactttgaatcttaattccatttaatgcacatatttccaagccacatgaacaccaaaattcatgcataaaattatgagtttttcattttaaagttgtatgtatttcacagaacacacaggatgtttgttttaatcaattggcataagtcaattccatgcccatctttgaattaccccttctgtttatgaagatccttacaaatgtaaacacatttttaaagacaactattcaagaaaaattttggagatgtgactatttaacgtacttccatgtaaatcaggaaagctaggaatatcatgtccttaattatttatgataattggcatagggctatttaaatattgatcctttaaataaatcctactacaatttcctccataaagagacacctgatatacattttatttagtcttgtcaatcatgattttgaggggggacaagcttatgatggttaaatgtctattaagttttgaaaagataacataaatgacctttactgttcacctctaagcctaatcatatttctatgtccacaaggacacaaggaggaggataaaaatgggcagggaaaggaaagaaaaagggtacagcagtggtttttactcaagccaaagtggagtacaactacagaggtcccttttgctttcataagatttcgagcactggtgtgaaattccacgttttaaaatctagccctgtggcatagcccacctttaaaggaaatggactgaacagcaatggaatttagcatgtttttgttcaggaagtaaagagactttgtgtcagttatttcttagatcaattaaattcctatattctagcttatactacgtataattactctagcttatactatgtatcctttaaagacagaaaagttaaaaattatgacatcttttacattatttagatttaaacttttgacagtcctttttcgctactggtagttggtataactttttaaattaacttaattggcatatactagctatcgccattgtgaaatctttactccctctcttattcaatatgaataaactaacaataaaatagttgagatgataccaaaaaaaggagatagtacaatgtctacacttttaaaattagtttcaaataaagtctaaatgaataatttccaatagtagtgtccttggagaagttaaacatttatgattttttgactcagtcctttttttctctatttattttgctgagatctgtgcttttctagttgcttattgacaaaccaaatgcctcttatcttttgctagtttgaacaactctaccaagttctctgtaggaggaacaaacaaggcaggactcagagacaatctgttggtaatctgctgttcccttattctcaccacactcttaaagccctacgtgctaggccacggagcaaaccagacatacagataagcaccaaagagcatatctgaggtcaaattccaatctcttccctccgaaatcacctctatgctcagtgggatcttgctgttctcctttttaaagagtaggaataaggtcaacatgtaatactccaatactcaaggattccttcctttccagattttatctccaacatgtccacctaaatgcttccagcaagcagctatgtggacagccttatgttgagagagacgaagatctctctcaatcattcagaaggaaatcattttcagcaaattgcaacaccaataacaatcataaatatagaaaccacagagcatttttttagaagtttctaccatttaagtatcatttgcatcatataaacaaacaaaccattcatatacttatagtacttccacaatcagatttaaatatatattaagttacaaaaaattaagtgattcctacacctaaatcctccaagaaatacaatttaggaggttggtcaatctgtgctataagccttcaaaagtgaagtcaccttccccagcactgacagtgtctgagggttgggaaaagcagaatcttccaagttcctagaaaaggtgcatctgggtgttcagtatttaggatggaacattaaaggtaatcagctacaatcttcccatattacagatgaggaaatggaggaatgaggcttggctaacactacctttggccaagttgttcccatagcttgttctctgtcacagcgaatcttttatcacagagttaatcttaatttctgtcgcatgcagattctgacaccctgaaactcttttgtttctgaatgtaggccatattttcagtcaaacgttagtgaagactttggagactttgcacctcagcagttgctcaaataactgatgccttttaattagcctttcatgttttattaacatgttttattataatcactcagtgaatatttaaatgcaattttccccccaaatgaactaattacacctacagctaggcatgatgtctttgtgacctggaaaaacccagcaataaacatttgagagtgtttgaactgtgtgggcagagagttgaccaagttactcaacccttggcccaacatactgtgttcctggtggcaactgatcaaacaaatgaaaagtttgatgcaaagggagcttagatgacatgttgaatgaacacgtaccttatgctgcatttcatgccatctctctatgcagcttctctgttaagaatcataatataaagccccaaacctttactcccagcataactcacttggtggtttttatttccatgtatggatataagatgaaattagccagagtgtcttaacctaacagaatattttacagagttaagaagtaaaattataaacaggcacattttcatagccttctctaccttttacttgatagaggaagagagaaaaattattttaatcaaaaattcaattgattattagataataacaagagaaaagggtgggaaagaggggagacccccaacttaggcatgagagcattaataatcactgccctgttgttataacccaattggcagttctcaacttgcagtaatagagctacttacttggataggtctgtaaaggttggcaatgccactccccaatgccacggccatagcagtagcactggtatctgacaccatgcacatacttctcccatgaatctccaatttgataaaacgtcccagtctctgaatcctggcattggtctaaaatacatggaaggaaaagataaacagccttgaagacttataactacgaatttaatttcagggtgctagagcatacatttagcttaaatagaaatttgcaattgttcttacaaatatatgcagttaaaaaaatattttgttcacattctttaccttacaggacagtttgtagtaaaaaaaaaaccaaagtacctattaggaggaatatttagttttctaaaaggtaatatttctaaataaaaatgtaaagatttagatttcagtgtatattgataatctacacattaattttaaatattagttattatttttacccatattaatataactggcttaacatttaaatagcaagaaaaaaatctgcaataatttcattttccttacttcttcaaaatttaaagaaactgtttgacatttaaatgaatgaactagactttacgagtatacctgctgagcagcttctaagaaaacctctcaggcttctctctcagttctggtaatctcacgtcaaacaaacggatgttatcagtttgttttctcagtgagcaacctgtctcttttggtaaagaaatagtaatggatcaccttaaactttgtagtgctggtaacacagctcttttaaggctcagccttcactatttgcttagttctattttgaagggcggccaaaaaaaaacctagagtgttttggtgggtgatatttacaccctttgctcatgctgttacacagctggtaaggaagtgagtttgagaccagcctgacccacatggagaaaccccatctctactaaagatacaaaattagctgggcctggtggcgcatgcctgtaatcccagctactcaggaggctgaggcagcagaattgcttgaacccaggaagcagaggttgcagtgagccgagattgtgccatacactccagcctggacaacaagagcgaaactctctctcaaaaaaacaaaaacaaaaacaaacaaaaaaaaaaggaaagaatacttttaatagcatggattatctttatgattctaaacccaagaataaattccattcaattaaaataagcctaaatttgtcaccaaattcagcaaaaaccagacgactaccaatatcgagatattttggtccagtattagagagaagactttgcaaagttctttgcaagcaactgatcaaagtctggagccaacttcagtcatgtgatttcacatagcttttcttatctgaaacttgctaaccattccccctgtgcaaactcatctagggaaatagggctactcaccgacgggatcacacttccacctgccccgaccctgaccgaagcatgtacagttcagcatgtgcccctcttcatgacgcttgtggaatgtgtcgttcacattgtaagtgatgtcatcaacaatgcactgatctgtttaggaaacaggtgggtgagtgagaaactttttaaagttccattgatgaaagaaaaaaggtatgcttctcaaagcatacaactacttccacttaattatcaacaccttccactaaaataacttttctacaagcatagaataacatttttttcaaagtttggtcagtaatacaatttttgccaaaaaaatttttttcttcccaaaatgtgtaacttttgcagaggttacagtatgctcaagtaaagaatgtggtaaaatacactttcctgtgagaagccagtatttgaacaaatacatgtcttactttctgaaaatttcttgcttagttgataatttcctttaaatatctgcttgttaggataaataagaagaagattaaacatatttatctaacacccagcatgatgtggtggtctggtctctggaatagggggaaggggaggagatacttagatttgggaaataaaatgtcaacagtattcacaacgctaaaataaattaggccaactctgttgctcactctttgagagatcctgagaaaattactttttcctttttgggtctcagctccttgatctatatagagtgaggtctctatgtgttattaaggtctctttcagttctgcaacaccacatgtaattattactcccggatggtgttacccactggacaccacaaaaggagaacaaattcagaccaatatctacgcactagccacatagattattaatagctcagggttctcccgaaatattacttttcatatcaaagaaatggaaaactaaaacacttttaaaaagtcaatacttcctcatattatatagctgggtgcaaaggagaaaaactaatctgaacaaggaaagttagtcccctatgtatttgtttcctgaaatctggatctgtaaggatctgattttagaatagcaaggtcttcatttctttacagaaattatcctatcttttctagacatgaatccagtggcatagcctaaagctgaatggatcaaatgtttcattcttacttttgaagccatctttttggctcagcctaagtacttacatgctaggagtgtttcagaacattagcattgctatgccgcttgtcttagcaggctgcctgctaagcctttcaggcttatcttaccatgcacagtagactaatgaatgacgtggcattccatatttcttcccctgcttttggcatagtgcaagttttcataaaaaaaagtgtccctttctgtaccttttgccatctcaaatatttttgttaatcagccagcatacctcgaagctgcgagtaggcaatgcatgtccattccccacgaccattcccaacacacgtgcacctcatcatgtgacccatgtcatgctgcttatcccactgatctccaatgcggtacatgaccccttcattggttgtgcagatttcctcgtgggctgtttggaaatggataagaaatgcacttgataaatgatcaccaggtctaaacatgtatgtgtgcaaaaggatcagttcagtttggtcatcctaagaattctcacttgggaagaagctttgtgtgcatcaaagacatctaagtgctgtcaggtgaaggggtagaatttttgagccctggaggcagaaaacgtagtccaaacgtgtcatagaaaatagttacaggaagggttaggggatgttaaactaagataatatctacacatccacacaaagggttcttgctgttctagaagcctggatttaactacagcttcataacttttcccagttccagtttattctggatcaaataaaaactatgggtttggatatagaattacaagcaaaagtgggttttttcttctaaactcagcatcttcttttgttgaaagaaataaaagtataagcaatttctttgtctcatagtcacacttgacagtgcctaccgcccaggctcttgtttctacaactggaaaattaaagggaatctatggggttcttgaaatctgaaaacaagtaaaaggtattcgtttccatttgttcgccatctatacaaactggggacctttaaaaaaagagtgagattccctacctgttagaaaacattgagttttagtcactttggcacttattaataagtgatagagcttatgcccatcaaaccacaaccatgtgtcaatattgtagctctgtgactaaagccgtcatacatatattaaatgttgtaagctactcagttgtgtgctctttacaaagacaaacctgtgcaaattcatatttccagacttacaaataagtaattatatttttgacattaaatcatgtcaatgaggtttaaaaattatataaataattatctaattattcttcccaatccttatgtatatgatgtaacatcacacacacacacacacacacacacacacacaaacacacttcacatgaagttttctgttgtctcaaaattgtgttaatgaatgaaatgggagtaaactggacactagtctttagtctctactccctaaattgttgtcaaacaagacaacccacaagggcttcatcttaccagccatggggcagaacccaaacttctggtcggcatcatagttctgtgtggtcccacaccacttcatgttgtctcttctgccctcagaagtgcaatcagtgtaattgtggttgttgtataggaaggggaagtggcacaaggcaccattggaatttcctcctcgagtctgaaccaaaactgccaggaacaatacacaacaaagaaggaaaagattaccgctgagctttccaatgtacacagaattactggtctgagagagccaggtttctgcagctcattcacagacagtctatctcagaataaaaaatgtctgataatatagttctaagcttcttagcatatttaccttcacaccttcaaaacaggtttaaatcccactttcactgtcatttccccagcaccccccccacaaaagattaaatgatagctttgaataaaacattgttttaactggaaaataagctaaggcactaaaacattcatcctttgtattcctcagccctgtgggatcatctactgattccaaaatacaagtatctttaatcacatcataatcccaatgtgttaaatcaaatgaactggaaggctactcccttggtgtcatttcccaacagtactggggaagatggaagaatcctcagctgttacgtgagcgctgcgatctcttgagtccaaactgaacaaaagcgatgcttcttgggcgggttcaaaataaatggctagaatgctggcaaataaaactagggcatgaaagtgagtttttctcacttctgtggctcccccttgggacactcaccagtgtggtctgtgcagaaagagtatttctggtcctgctcataattcgaagttgtgctgcaccaaagatgtccgtcctgtcgcccttctgtggtgcaggagtagaacgtcctgccattgtaggtgaatggtaagacacatggctctccatttgagttgccaccgtaagtctgggttacagctacaatcataatcaaaagagtgtcagtaaacagagatgctttatctcccaccagcagctgcttatttatggcttcaatgagatactgagcttgtgccctcaaaggaagaagctatgagtatagatgatcatctcgttaatttcagtcaaaatgcattactcaggaatccatgtctactgtggatagaacgacacctgagttcttctgctgatgtccttcatgaccacttctgctgccatgcctcagtttctctatttgtaaagctatatttatacaggtcaattaaggatgctgcttaaggatgttgggataatatttatgactatatctatgccataaaattaatatatgagactattctgggggagaattgtgtagcaattgttattgccatagtgactaccatgtttgtagtgcagaatacatatattaggttattggaagatgtttacatcacaaagctgctgaaatttgagatttagaatataaaacattgatgattattcagaaagtagctctcttgtaacaacactttagacagataaatacaataaaatttttacccatgatatccatgaccagaaagaaaatacataaattaaaaagattggaagaaactatttcaaatgccaaccctaattgttatcacagggtggtaagattacaggcttcttgtttgttttattgtttcacattgaaaatgtattgtccttcaaaaactaaataataaagtcatcagtcctattcttcaaaaagataatgcatacctgtctcttggcagctgactccgttgcccaggcacgtgcaaagcatttgcttatttccttgtgtcttcagccactgcatccccacagagtagaccacaccactgtctgtgacacagtggccatagggaggaggctgggggtgaggctgcggttggtaaacagctgcacgaacatcggtgaaggggccagatcctaatggcatgaaaagggaatgtcacaaaactgggtgagagaagacaattcactactttctgcagtcaggatcttcaggatctcacagagatcactctgaaatctatgtcgctactggcctgggactggaaaaaaatgtcccttattcagcagtagcttttgcatttagcctaggaaataatccacaagtgtctaccaagtggtctccatcctccagctcagctggggctactgggattatatttctttttgtttgtttgttttttggttttttgggttgtttttgagatggggtctcactctgttgcccaggctggagtgcagtggcgcggtctcggctcactgcaacctctgcctcctgggttcaagctattctcctgcctcaacctcccaagtagctgcaattacaggcacgcaccaccatgcccagctgattttttttgtattttttagtagagacggggttttgccatgttggcaaactcctgacctcaaactcctgtctcaaactcctgacctcaggggatccacccgcttcggcctcccaaagtgctgggattacaggcatgagccacctcgcctggccgggattatatttctcaatcacagacatcatcctgccactccatacagcagataccttcaacacatcctcactcttctgagtaaccgagctcatcagagggtgccttcagcagctgtcctggattttctggaggtcacctccaccttccacattttatttctcctctggattatttgtgattctattgtgttttttctaaaaccaattgatcctcttaagacagctttcctttcagaataacacaacaggatgtgttgatcttttcttttttctttttttttttttttttttttttgagacggagtctcactctgtcacccaggctggagtgcagtggcgcaatctcggctcactgcaagctctgcctcccgggttcacgccattctcctgcctcagcctcccgagtagctgggactacaggcacccgccaccacgcccggctaattttttgtatttttagtagagacggggtttcaccgtgttagccaggatggtctcgatctcctgaccttgtgatccacccgccttggcctcccaaagtgctgggattacaggcgtgagccaccgcgcccggccgatcttttctttcaacttttagatatctgttctcttgaaggccagggcccaccgcagaacagaatcagggctgaggctagaccaaaggtacactgaattcagtgcctccctaagtgctgctgaacactagaacccaaagatgttcacagacaaagaatcccaaggtcaaacgtactagggagacatggcgcccatcccctacactctaccatggagagtatgatgtaaaggaacacacagattctgcagagcaggttccattttgtttaacccattgcttctcaaacttttttgaacaatggaatcttttcagtattggcaatattcatatatagctaacatttattgagtgtttatccccatttaattcccacctacacttttaatctattttggtagactgacatttataattttttttattttttattttattttatttttttgagatggggtctcgctgtatcacccaggctggagtgcagtggtgcgatctcgggtcactgcaaactccacctcccgggttcatgccattctcctgcctcagcctcccgagtagctgggactacaggcgcccgccacaacgcctggttaattttttgtatttttagtagagatggggtttcaccgtgttagccaggatggtcttgatctcctgacctcgtgatccgcctgcctcggcctcccaaagtgctgggattacaggcgtgagccaccgcgcgtggccgatgtttataattttttttggccagtagcaattttattaatgataataaaataactcaaagatattatcaaatctaatcttgttcaccttcataagtgctcaaagcaagacaaaaactcatcaaaagaagaaaaattagaacaattaatatttttaattgaaggatggctgagacactacgtaatgatgttggcacatcatatagtaaaaagttaatcaaaacatattaaaaataatgagaggagtgcacgtccttgttggccatatttctctcttcagatttttatgaaacatttatgacgtaaaaatctttttctcatgccaaaaatgattaaaacttgttttttaaaaagaatgcttagatatcatgtctttcatggccatctctaagtcctctctgaatttctaaaatttcgaatgccaatacatgaagaaaataattgtgtgttactttatagaatgtaacaaagtttgccagagcatagaaaccacatataaaggatggtttccactacaaaaagagttcaatgtcgggacagggaagtatatttcattcaaaaacaaacaaacaaaaaatccaaatgcactttttttgtcctttcctagcagaagaaccaggtagtcatataattaattataactctcatttcctttcaaatgaactttggatattcaaaatacgtgtgtgtgtgcgtgtgtgcgtgatctatccatggtaagttttatgatgctagcattctttaaaactcagttttatcttttggagataaatctggcttttttccccctaaggtttatttgtatgtcatttttctttttttctgaaaaatttaaaacttgacattaaaaaaagttttaacaaccaataatgtgtaaattatcttaggttattagctgaaacactgcaaattatcctcaaatggcatgtcaaaggaaagatggatttgcggaaatatttcttgacctgcttccccatttcccgcccctgctcgtcctgtgcctcaccgctcgatgtggtctgcacagaggtgtgcctctcacacttccactctcctcggccgttgcctgtgcagatgcactggagcaggtttcctcgattatccttcttgctccaggtgtctccaattctataggatgtccttgtgtcctgatcgttgcatctatctgtgtcacaaaggaagcacatacatacatcaggtcgagagtcgcaagtggtcaattcaaacttaaaaaaggaatgctatctatgcctggtaatctatttttggtaatatgttcatattcagctctggtgctgcaaggtattacacttctgaaagatgaaattacatttgttacagtggaaaggcagctgaatggtttagtctagtttcatctctctgtcaaataacattttcatttatctatttatttattgttttcacactgttcctttgactaacttcattctctggcattatatttcatctttttccttctcaggctcttccaggatttttcttagtcatcactgtttatggcctgcctttcaatagggaccttgctttagaaaactaaaaacaggctaagcgcggtggctcacgcctgtaatcctagtactttaggagggtggatcacctgcagtcaggagttcaagaccagcctgggcaacatggtgaaacccccgtctctactaaaaataccaaaaaaaattagccggctgtggtggcgggcgcctgtaatccaagctactcgggaagctgaggcaagagaatcgcttgaacccgggaggtggaggttgcaatgagctgagatcacaccattgcactccagcctgggcgacagggtgagactgtctcaaaaacaaaacaaaacaaaacaaaacaaaaaaaacaagcaaacaaaaaaaagcttataacaatggggaggcaagcaggtatcaaagggtcttcaccaatggctacaaagaagctataagaaggtggtagtatctctttcttcatttgttatgtaaaaaatgtagaggatgcacaatttctttgactaaaatattattttcccttcccctatacccaaacatctacagtatttaaaaatcactagcaaaatagccccaaattattcagtgttagccctccactggaagagtgggatcaacataaaatgataatttgtaactaaatgaccattagtctatgcgtgcatttatctggtaaatagattatttaaattataatccaaatttgctctgtgccacgatgtgagtatagaggatctgatgtctttgtgaattggatattgttgcaactcctgggttagagaaaaaaaattaatagttgatgtaggttcaaacaaatacacacccacatccatctaccacaagaatagaagtttgcatgaaggtataattactgattagagctttttcccaaatccccagcgaaaagtattatcatcccctgaacctccatagcactactttcagtatttctgttgaaatctttaatactgtgttttgcagatgataaatatgtataagactttctcatctccctgaccccctaagtactctttgaaggctgggctaatgttcatttcatatctgcacccctataataccttgaacaaagtaagtccttataaaattttctggaataaatgacttctctttgagaaacttttcccaacttgctatttaaagagttctaaataacagataaggtttgaatcagacatctaatttgtcttaagctaaaatattgccacaaagatcttggaagtctgatgatcacagtaacattttaaatgcaaaatatctaataaaccagcaagtttctgggaaagctttggtcaaaatggttaccacttttcatgagagacctatttttgttagcaaagaatttgaatttggatgatggctatgttaaaggtagttaaatgggttcagctagataaataaaacaggttcaaattatttggatttgattttaaacttatttacaacaccagtagttaatggctgttttacttcaacaaactctctagctgttattagtttacaatatcaaaaaaggagccttcaaacccaaaggcaacaattaagaccccaagacaatcttagaaggagcagtaaagacaccagaggccagcttctttacagcactaatcaaatgcgttaggtcagagacactatccctaactccagagtagataaatcattttaatttatgggataaattctttttaattttatcaatttagcctgtgaatgtgccctatttaaatttcaaacatagaaggaaacctaaaccttttgttcaactctatgtcagtggcagtgagctgagattgaaccttatcaaagtgatatgtttttctatttatgtagtcttctctgaagatgcggaataagttggttatgaaagttttcttgacttccagaagttaccaaagcatgctgatatactggatgtgttctgagtaacatagtattacccttctctctaggaatccagaaaacaatacctggcttaatctttaacataaagatgtaaaacatacttctagaagtgcaagtgatgcgtccgctgccttctcccaggcaagtacaatctaccatcatccagccttggtagggcttctcccacgtttctccgaccacataggaagtcccagcagcatgatcaaaacacttctcagctgtagggaaatttggaagaaaaacaggaaaaaaaggttattttgaattgtgcaagctccctgtaatttaaagtgtagtgtgtaagcaaaaattcagccacattttttttaagtggcactctgttcagaaagaatgacacacccagcatctaagcacacagtaagtagccaaggcaaaagaaagctcaagctgagttggcaggcagaaattccattctcctaataagtacatggactacatattttcagcgagccccaaacttcccagcagcatttccagtagcaaggatctatgtatgtatctagtctgtgggagactacatatgcaaaattccaatcttaattataaatgaccaattatgaattttgagtggcctaaatacaatgacaaagaaagctatttttaaatattggaaagcaaaacaatacaaaacaagacaaaaacctctaaattagaagacaagtaaacagagtaaaatttatagccagaaactttcaggcttgtacttacaaaattcaactgaggattgagatccaaagaagctcaacaacttttaatttgaaaagaaatgagcagagtgtgacaagcacacactatttcatgtttcggtccaggacattccatatagaaatgtgtccaaagtgtcatttttttttcttttaaataaattatatcttgacgaaggaggaatctgagatcagctattaggtaaaagaaatgactccattctaaatctttcaattctaccttatgcttttgaagcaaagttaagacttctatgtgtagtcagtactttttgatctaactcctgtaagaagactatggattatataataattcattatttcaaacaaaattcccatttctttattggttttcactggaattcaggtctatgacctatgtagatgtgattctggtccaaccccacattagaactaagcatcccagctcttgctcagccctaagactcacacacctatgggcttgcaggtccattctccttttccattaccaagacacacacactctaacatgtaaccaccagtctcatgtggtctcctccaggtgtcaccaatcttgtaggactgacccccttcatggcagcggtctgttgaagatacaacgaaaatgttaggagagggcagaacagatttttttttttggtctcatattccacccatggtaggtacttaggttggctaaagtagagacacagacaacagctttcccatcagagacaggggaaacgttaacaggtctggtcacttggagtcaattcagttaagtgtcttgcttagaacacaatggaaaaccacagagaaatctggatggcaaggaagaggtcatgaatcctgctttcccagagagatcacaggaaattgggtcctaagcagaaaagaaaggctgggaggcttggtcttcactcatacacagcaggctaagactgagactaattcagtgaaaaggccacatcaggcacagcactccagcttttgggagcatggagagcctgtattttaccctaggatagaaatgtcattttggtggaaagcaaacagacatatgcatataaagtgtggaaatcctggtagttttctaagttgttaagcccaatggcacattcaaatgctgaactagattgtaaacactatggacccttgcctcttgcgatttgcctgtgaacttggataaaccctaacatgaaatatggggaaagttgattgggcctattcacacgggacttgttcttttgaatagaagtctttaagacgacttatatttaaagaatggattaaaaaacttaaatactatcttaatagaatctattggtaacccagtgaatcatactggaaagagtgccttagctaaactagagttgagaatcagcccggttcccaaagttccttagcaaactctattgggttaataattttgtattatccctaggaatagtgacatctgcttcctgggtataacctactggtcaccaagaaaccagactgtttctgtgaggtgcaagaggtctctgcattgcaaacatgaagaccagacaacacatggctggttcactcttcatgaacaccttcccagtcactgcagaaaagtctcatgatttgtctagcttgaagatatccaggtgatttaaaatgggcaactcccctaagcatgtcttactgaaatggaacccaagaggtctcttggttctactatgtacagaaacacacacactcataaatgcacacacactcataaacgcacacacatcaaacactgattccatctgtgctcatacccgtctttaagaaacacaggaaccagttgggtgaccacttaagagtacctggtcaccaggggcaaacctcaaagttcggaatatccagtcatggataacagaaaatgacagtgatggtaacagagaaattcatatttgatattttggcatcattttacacaatctcttccttacttgcgatggtacagcttattctccctcgcccagccccgatgcaggtacagtcccagatcatggagtctttaggacgctcataagtgtcacccactcggtaagtgttcccagtgtacttgtcaaagcaagtctcttcagctgaggggaaaaggaaagtccatgtgagcctcacttaggtacaagcttttctagttcactaatcccctctaaaggaaaacccacttctctattccacaagtaacatggtacacctcaaagaataaaatgaagtgagagatacagatttttatcctaagctctaataaggccatggtttttgaccttgacatattgtcaaattttctgtaaattattcatattgtagaaaaatctcaggctcttaggaaaaggccatataaagtactaacttatgacagagctagatttgtgaagggtttcacattccaatctctgactcagaaagtcaaagcaaggttcacataaaaagcaaacgattggccgggcacagtggctcacgcctgtaatcccagcactttgggaggctgaggcgggtggatcacctgaggtcaggaattcgagaccaccctgaccaatacggtgaaaccccgtctctactaaaaatatgaaaattagctgggtgtggtggcatgtgcctgtagtcccagctactcaggaggctgaggcaggagaattgcttgaaccctggaggcagaggttgcagtgagctgagatagtgctactgcactccagcctggtgacagagcaagactctgtctcaaaaacaaaacaaaacaaaaacaaacaaacaattcgaagatccccacctcccacaaggccttgacagttgttaatcctatgatttccattttcccctgatcagtgcttctctgacagagttgctataatttatgagaaaaatatcattggtcctaaaggaatgagaactttgaagtggctaatggttttgtgttaactgccgctgacaaatcattttacgatgtaagtccccaaagtgttttctggctcataaactaacagtttaagatttgagactgctttctaataaattaaaattttataagcaattttttttgtcggaggacacacaaaatctttcatttttctcatcaaaaactttgggagagtaaagcaaaaagaagactctaggaactaatttgggaaagattcgtttctttgttttaaaggtaaaagcatgtgaaaagcaaatataagcagtttttaaacttaagaggaaatgacaggtaattctattagaaaaatggtgtatgtatttttacttactaatgcaaagtttaacaattaccacttcatgtattaaaagatactaactatggggcttgttgtcacttaccttcaggtttactctcgcagttaaaacctcggcttcctccataacaagtacaaaccaacgcattgcctaggtaggtccgctcccactgttgatttatctgatagtgttttccattgtcataacaaccggctgcaaataattgaaggaaaacgttacatttgcatttctccttttcccaaaattatggaattttcttcatgtgaatattgacgtacatatttttttccttttaactttgctaaaagttatatacaatgatgtcatttccatctggccaggggtctacataaaaaagttggaaacattttggaaggcagacaattgaagtcacatttttaaaacatgcaaggaacttaaatattcttttggagtaatagtcaaaaaggacaactttaagcagctttctcaaagcaaaaggagggtgtgtctttgaaaaacggaaagaattccaacctctgttcttggtgaagtatcctgagcggccctaaagaggtctgaaccaattacatctcttccaagttagttagaaacaagacagctatttcaataccccctttccacccccatgttgaaaatatttgaccaattatttaacagaaggaaataagtagcagtaaggaccacactaatcccagacggaaaatttatagacatgcatcatttttctctttaaaggcaagttttggttaattcctagaaggacaatctgaacgtgcagaatttattagaacacgggaaagtcgcagagtcctcgtcctccaatgcacggtcttatcatcccaggccctcagaaccagcgtgctcaaaactcggtccttttgtgtgcacagctggtttctctcagtaaagcgcgcacacactcgcacacacgcgcgcgcacaaaacttcagccccaactttggtcggctttagggtcccatccctgaggcagcctgtttcagcccgcggtcagtactcacgcttgctttgactgacagccaccggggactggggctgaaccatttgctgagcctgcctcttgctcttcgaggctcccgtggagggcaccgctgtccccaggcacaggacggccagcagcagcagcccgggccccggacccctaagcatgttgagacggtgggggagagacgcccgcaccgggaggcaagttgccaccaagtttgcttcccttcgcaacctgcgggaaaaatcccttctaatgcctcccgggggttgtcgcctccaagaaggtgggggccagagggtggggaaggggacgggtggagggacagaagggatgcagaggaccagagaagttgtggctgcaggtcccctcttcccgctcgcgcctggggttccctctcctccccctgtgcagcacagccggcgcgggcgtccgagcgccgggagccggggcttatatgggacggtcccctcccgcccctctggaggcccggggcgcgggggaggagagacccgccgggctgtccccgccccgccccaccccacccgcccgcccgccggccgccgcagccgaccgcgcgccgattggcccgggctccgggtgacgtcacgggggactgtgggttcgcagcgaacaaaagagatgctgatggcccgccaggactggggcaagacaactttttttcggtttcctttgcggtcatcaaactttttaggggatgggggaagggatgggaagcggctgggaggaaagggagtggctggacttgtgtgaagcgaaggggttgcaagacgctcccccttcccttttcttttttattgggggtggtggtagtgtttgaggacattgcgtcacctctcttcggggtggagggggggaatctctgcttataggagtgtattttgtgaggaagaaaacccataaaatatccacgaccttgcagctgttaagaatccagacttttcagtcccagggcggggctgcctttccccccatcccgctccctttctttggactaaagggtactgactcgggactcccttattttgtcttcacagctccctgttcggacttcttcccttctcagcgctgtgcctgtctggctctgagaaagggccagcgggcgaacggggagcaaaggggaacagagacctttaatgagcttctactaagtaccgggagttccgcggggcgctttgcagatcccggggaagttcagagaatgaagttttcttttgcaaggacaaagtaacagtttacttttttacacatgcaggaaagccttcctttcctggggatgggacgcccgtttccactgaaagtgaaatcactgtgaacaacctgaaaattggaaagttggaccagctgtggggagagaaaggtcttcgtgtcctttcccacgttcaccgtgccagttacacacaaagcagagatttttttgcttgaatcattaaaagccgggtgggtggggggcaccctatgtactgtcttgccctccttcggcccctttctcacatttatttgccattttctttttgctgacaagttccattacagaatgccccctccatcccccgccgccagattttttatatttcaattgttatttactccaagagtgtggaaagttctcctttaagattcccccgccttgaactctaaactcagagtggaaagggaatctgaaaagtctctcatttagcaacacatcacatcagtcctttttgtcagataaacacaggcacaattgcttttaaagatcttcagaaggaggagtccaccacttccacagtagatccagagagacccgaactgaatgctttgccttctccttgtgttaggagttcagaggttccatttgctttaaaacacaagaagctactaataaaatatatttatttcggcaaggtacctattttctccaaaagtttcaccttcagtaattgccacaggagtaattagaactctgtgttctataaaatgcctgacacattaaagacacaaaattagcatttgtttttattcatgcaaggatttaaaaccaaaccaaaacaaagcaaaacacccagcaaatatcagtttcctacaaatagtgtaaaaaaacctcttgaggaatctttgtgacccacactccaaattgaaagagtgccatggatttccccaaatttagaatcctgtctgggttagaggatttttttggaatttctcatcacttgacaaaacagttttctcttttcaaatataaaagagctccttgtaaaatgcttggtaaatttctgggaagccgagtgtttcttccagagggaaggatacctggaaatccggatgtaagcaagataaacctgtagctaaagctttcttaaaattcattgattctgggggaaggaaataagtgattagaaaagtatttggtcaaccaaaaccatgatagtttgatatatttactgcactgaaaatacactagaatcatatgcatagtggagcttgaagtggaaagcccaccttacattttggaagaaacttttatatttcaatcccatagatatctaatttatttaaggaaacaggatatctctgtctcataagaaaaaaaataacatctgactgatttttataggaatgcttgggagtttactcttttacttgaaaggtttttttttttttgcctttttttttaaactttagaaacagaggcgtttcttagttaagataacagggcttactacagtattctttaattatcaaggtcccttgtaactctaagtctgttatctctaattggagagataattaaatcttaaagaccactctgactctaattcaaccaacgtgtgtggtgtccaggatcgttggacttccttaagaattctattttatccaggtgggttcttcctcagtaaattgtattctcctattggtaggaaatactcttggatttctttctttctttctttttctttctttctttctttctttctttctttctttctttctttctttctttctttctttttccttctttccttctttctttctaaaactgtattcagagagagaaatgtgacaaaaaaagggaaatcaatagagacagaaagtagattcatgggtacccaagtttatgggctgggaacaggaattaactgtaaaagggcacagggaatcttattgaggtgatggaaatctgtgttctaaaactacattgcagtgatgactgtacaatttggtaaaagcttcaaaattctggggattatacacaaaatgagtgaattttacggtatgtaaattatgcttcaataaagttgtttttttcaaaagttgattttaaaaattagtatttgttcttttttactcttaaccatctcctgattttggtttcaaagacttgctctcaggtagcagcaacatacacaaggcgtcctcatttcttcatttttctgagaggaagtttgccttgaatatagtagtggatttcttctacaccagtaactccttctgaaacctactatttgtgtgaaggcatatatgtggtagagacagaacaaatcttcatttaggactgtgccttgtttcttcttggaattgccatagtgatagaattttcccagagcctcaggcaatttaaactttttgtaacaaaaagaagcacatatattttcgggaactaggggggtgtgggtggcggggggcaatggtattgggaaattttattattccagaaggttaaggaggagcatgagcaattatggaaatctgaattaaattgatttcatttgttttgaagattagcaatggagacatttgattaagcacaaaaaataattgatcagatccagtcatttagaaggactgaaataaaaacaggctaggtgtggtgattcattcctgtaatcccagcactttgggaggccagtgtggaagggtcacttaagcccaggagttcaagtccagcctgggcaatatagtgagacactcttaataataatgataataataaccagatatggtgacaggcacctctcgtcccagctactcaggagtctgacatgagtcctgggggatgactggagcccagaagatcgagagatcaaagctgcagggagctgtgatcacaccactgcactccagacccagcctagatgacagagcaagatcctgtctcaaaaatttaacatttaacattgaaatgttaaatgttaaaggttacatttaaatatgtcacatttagatgttacatttcaaatgttacatttaggtgtaacatttaattgatgggctgtttttcctgaaacctttggcttttatcctgttattaatttcttccagttctgctagagaggaggccattgactctggagagctcgaactttcatttcatcttcttctataggtagattagagggagataaattagggtagttttttttttttcttattttgaatttttttttttttttggcataaaatgcttcccttcttccttgaaaatggccacgtttacaaaaatgttactcattaaccacaggtgtgagaagttaaaaataaacttccctgcgggcagccctcgtaagtagaatgtctgaaaagtttgtcaagaattgacagggtgcctgcaaccagggagaaaatactggataagggctttaaattatgccatgaaagctaaccagttttcgcttaataggcattttgtttacattttaagtgactttattttttaatcagcactttttaaaagccttaatctatgctttttgcttcttaacaggaatattcttttctcattagagtgatgtaactcccaacaggcatggcaaaggtgtttaacttatccagtaaaatgggaactaactactgtgtagctggaacatgtaaccaaaactgtcttggagaacatttcatctttccaagcaaagtagcagcttcttgtaaaaattttaattttgtatgttatttcatgttgctggcattaaagagttttttgttgttgttgaaaggctgaatttaaaaaaaaatagaagttttgccatatttaaattattttctatcctttttgcattaacatactttaaacatctcatatgcagctaatcacaaaagttagttgagccaaatgcttaaaaataaccacaaacattatctagtaaataacaatttatgccaacaatagactattttgatatgagcagtcaatatttatgcctacctgtctaattagtgaattaattagttaaaataaattaagaatacattcaatcgaattgtaaagatgccatatacatgttattgtaaatttatattgaactattttctagataagtttgatatattctttcattaagtatgaccattttactgagataaaatggacatttaaaatcattactattttaaacattaaaaactaaggcactgctggccgggcgtggtggttcatgcctgtaatcccagcactttgggagaccgaggcgggcggatcacaaggtcaggagatcgagaccatcctggctaacatggtgaaaccccgtctctactaaaaaaatacaaaaaaaaaaaaaaaaaaattagccaggcatggtggcaggcgcctgtagtcccagctactcaggaggctgaggcaggagaatggcgtgaacccgggaggcggagcttgcagtgatccgagatggccccgctgcactccagcctgggtgacagagcgagactctgcctaaaaaaaaaaaaaaaaaaaaaaaaaaaagaaaactaaggcactgcttacatgcatgcacatttaagtagtcacgaagtcacaaagatttcagcacctagatagaaataaatagctacattttattaaacactctaaaccagatccagtactaagtgtttcatatgaatttttttcatctaaccatcaacaaacttttaaggtaagcactatcatcctctcctcttacagatgaggatataaagcttagaaaaacaatgtgcaaaaatgctactcattaagcacagatgtgaaaaggaaaaagaaaatgccctgaaggcagctcgcatgagtataatgtctgagaagtttgttgataattgacaaagaatgaagttttctcaatcacaagccttgtagaaattgtggcgtcaagttgtgtcactgtcaataccaggtgattagtcaagtgattacataatggtctccctcagaaccaaaggtatgggcaagacaactggctaaagaattttgtgggtgacttctttcacatgagattaatttatcaaaagatgtcacacaggactctgccaactgacacgctaccagtttccatctgttgtagccaaggccattcttctgggaaccaatttccttcaaacagcctggctgtgtttcagcattttgaatcaaatgtggaagattgttaccatcgactctccactgggctggaagtttgctgggggcagaggctctgtcttgtttcctctgtatgcccagcactaggtaccaggcacccttggataagtacttggcaaatgtcaaatgaatgaatggaaggagagaagggcagatgacaaacactctgagattcacattcagtgactatccagccaggcacagtgctaagtgctctgcatatgctattttattttatcttcaaagctactgccagaagtagatatcaatagtgccattttactctctgaagctcggagctgaaagatggtcctagagcttatgctgtaagaaagggacagagctgaaattgaaatcacggtcctcctgacacaaaattcttgctcttaccgaagacatacatggctttccccaaagagactttgccctatatgttaaaagaacgttggaaacactctcaggcagttactttttatcttcctctagatcgttctgccttgcttctgggccctgggcctgaccctgtgaactgcggggctgcttcctctgtttgctggaggacagaggacggagatgagagttgttcctgcccactccctccttgttctggcttcagtgccagagttctagtggcagctgcctttccctaggacctgcattatcaatggggcaacagtgccccaagagggtaaaagtgggttcttggggtagaaggggagtggttaaaaaatttcaaccctacctaataaaaattttattccttagttgtgaatttaacacttttttttttttttttttttgacagaatcttgctctgtcacccaggctggagtgcagggacaagattttggctcactgcaacctctgcctcccgggttcaagcgattctcctgcctcagcttcccaagtagctggaactacatacatgagccaccatgctgggctaatttttgtatttttaatagagacggggtttcattatgttagccaggctggtcttgaactcctgacctcaggtgatccgcccgcctcggcctcccaaagagctgggattacaggcatgagccaccatgcctggccatgaatttatcatattagatagactttaaatttcatttctttcctggagggttgtataaggtagggcattaatacataaaagaaaaagggagaaacattgctctaggacagcagtcctccccaggctttggtcctccaaggctccagctatcgctggctccttccccatgatggcagccgtaggagtgacaaactgcctacattgctagtccctgggaacctcagcatcccttttttattccttggtcatgcccacactggggtaacagtgctttcacaaaattctcccgatggaaatcattttaattccattttctgctaaaaccctggggatccagattctttttttttcttttttttaagatggagtttccctcttgttccccaggctggagtgcaatggcgtgacttggctcactgcaacttccacctcccgggttcaagcgattctcctgcctcagccttacaggtatgcgccaccacgactagctaatttttgtatttttagtagagatgaggtttcaccactttaaccaggctggtcttgaacacctgacctcaggtgattcacccgcctcggcctcccaaggtgctgggattacaggcatgagccaccatgcccagcgacgatccagattctaaccatccaatgatgacatgagcagtccaccccatagttttaagtcttaaattatagcagaatagacttaggacacacgaattcttttccaaacttagcaactagtattaatcatgctgtgatttctttgtatttcccatgacttacatggtcttatttttttctctctactgaatgcatgcgcttttaacactctatctttcccaaagtaaaacgctcagatgatagaagcaaatgacatagtcatcatacaatgacggagaaaagaaaccagaattttatatttaaatttatgatattttagacagggtctcactttgtcgcccagattgtagtgcagtggcaagatcttggctcactgcaaactccacctctcaggctcaggcaatcctcctacctcagcctccggagtaggtgggattataggaggtgtacaccaccatgcccggcaaagttttggtattttttgtagagatggggttttgccatgttgcacaggatggtctcaaatttccgggcttgagtgatcctcctgccttggcctcccaaagtgctgggattacaggtgtgagccaccacgcatggtcatgtcgacgtcttaactgtcttggaaataatttgattttgtccaggtaatttggttcacgcaaagaagttgagatcggggcacatcagaaagagattcatcttttaaagtgcttcttaaatctacaaatgcaatatatgtaaaagctaaaggtttttatatatttttcacacatgtaaaaatgtaagttttgcctttaaattcattttagatatgaaataatctagctgagagcatgtaaagtcgaggaaagcttattcagatccgctctagttcagcatgtggtaaattcctaggtgttcacaatattagtgtacacaaattccttctcaagaaagaaaaccttggacagacctggtagactagtatcacttatgccttatagagactttctgtcaaaaccaaacaaaaatctgtcatatctttattcatagaataaaatgtgatattagggaacacaactgtttctggaatgcattgaaactgatagtattctatagatttttctacttaacaattacttattattactattattattattgttgttgttgagactgagtctcactctatcacccaggctggagtgcagtggcatgatctcagctcactgcagcctgcacctcccgggctcaagcaattctcctgcctcagcctccccagtagctgggattaaaggtgcccaccccaacgcccagctaatttttgtatttttagtagagatgggtttcaccatgttggccaggctggtctcgaactcttgacctaaatgatctgcccgccttggcctccgaaagtgctgggattacaagtgtgagccactgcacctggcctcaacttacattacttatttttcaaaaactagagaatccattaattttggcttgtttgaatttaaaagtgattataatatttttgttagttatatatgagcagtatttcactacagctcatcttaaagatatttgataatttatcttctatttttacagcgaaatggtcacatttttgtcagttgacaataaattctttttttttttttttttttttttttttttgtagagttggggtttcgctgtgtttggccaggctggtcttgaactcctggcctcaagtgacccacccggctcagcctctcaaagtgctgggattacagatgtgagccaccacacctggcagacaataaattcttgaaagattcctgatactttaccaacttacacattaagttaatcttcccattttctttgtccaattaagttttaaagcaaaataatataaatatttatagacccaaattgtaaacacatttcagttttgaagaacaatataaagtaaatatactatggaattacaattagaaaaccaagtttgcactgatatttttaaaacttctctggggaacttagtttttcaacttaaggacacaagtattaaattagaaggtattttccttcactaacgaaaatttttgttttttaattatctattcttgtctttcaaatttaagttttaatggcggaccaattaatgttgcttaaagttacaacttagacaaacagttaaaatagcttagcaaattgtggttctggttgttctcctataggtaattaagagggcaatgactcaagatttaaaaaattaaataacatgtccacacaattttctctgaaatgttcccttcagatttttaaaacaggtttattgagatataattgccatctcataagccccacatacctgtatacaatttgacaagtattgacatacttttgacaattttctattacgtacattttatcttttcttttttcttttttttacaccacccctctccacttatta

SEQ ID NO: 94 - DNA, 197818 bp, Homo sapiens
  misc_feature (1)...(197818): n = A,T,C or G
ggaaaagccccaagaaaatgaaataggactcaatacatattcatggacagcttcttcagccaaggaagaagaacaatatgaaacaaattaaaaaaaatttgtatagccagaccctgtggctttatcttggcaattctaagaataattttcttctgttactgttattgaagcataactaagatggtccccaatgatccctgcctcctaatatccatgtccttgtatagttcccaacctttgactgtgggctggactcactgactcacttttagtacatggaatacaacaaaaatgatgggctgtcacttctgagattaggctacaaaaagattttggcttctctcttgcctgccctatcttgctctcttgatttctcaccatgatgaagccaaatgtcaagttgtgagttgccctggagagatactcgcatgacaaaaaactaagagtgacctcccaccagcagctagcaaagaaccaaggccctcagtctaccagtctgtgtggaacctgtgaacaagcttgaaagcagatcatgtcccactcaatccttcagataagactacatctctggctagctgatggcagcctggtgagcaaacatgagccagaggacccagctaagtcatgcctggattcctgacctacaaaattatgagctataaatattgtttcaagcagctaagttttggggtaatatgtcacaagagcaataaataataaatataataataaatgtgtatttcttttcctttttttttgagatggagtctcactctgttgcccaggctggagtgcagtggcacgatatcagctcactgcaacctctgcctcgtgggttcaggcaattctcctgcctcagtttcttgagcagctgggattacaggcacatactaccacgcctggccaatttttgtatttttagtagagacggggttgcactgtgttggccaggctggtctagaactcctgacctcaggtaatccccccgacttggcctcccaacatgctgagattatgggcgtgagccaccgcacccagcctaaatgtctatttcaatgaagttttacaacacccagatcaagaaatggaatacttctggtttcccagaagctctcttgtgtcccttgagtccctcttccaagggtaaccaccatcctgacttctaacctatagatgagttttgcctatttttgaattctaaataaatagaatcatgttatgacatgtactatttagtgtctggtttctttatttcaacgttaggctgcagttctttcatcttgtaatattttatatagtattgtattttatggagctatttatcttattatatatttttagtattctcattgctgtgttacaattaattgtaaatatgccacggtttatttgtccattctattttagcatatttctattggaaatatgcctgggagtaagattactgggtcatagcatttgttcagatttagcagataatgctaaatagattgccaaaggggttgcaccaatttacactttaccagcagtgtctgagaccaacttttatttcactatgtcagcaggcttctttgctgcctctcagtttagcacaagacaaattatcccatggtattttaaaagcatactttattggtaatactactactaataataagaagaataacagtgatcataatcttttggatatctaattgcctgatatgttaattttcaaaaagcaagatacagtcagtacttcattatattttatattttatctgtatttagaatgcatggataccatggttatctttaaattagacttttaggagatacccaggattaaagaaaagaaatggtagaagtagaatgcttttatatttagatgatttaaacgaacttgggcttttctctttttttaagcttaactttcccagttaatagccttcattttctggttagtattgctagttgaagatatcactgaagcctattgtttttcatcagagagacaggttttattgtattatatctatttttcaattttgcatcagtaataatattttgttgatctatatgagtttttagcattgtgtactcaataaagataattggaatattactgaagatacccagcatttcgttttaatgataagcataaaaggcagattcctttatttgagccataatttttgaattcatggttatagccaagacgacagaatcatatgagcttagcctgtgtctataataaaagtaatgtatataaaagcaaatttggaagtagcaggccaatacatgggtgcttcagcctcgataggcttggtttggatagggagatgcttaatggttgtgtttacttgtcacctgaaagtccctggaaaatagagatgttcaaatttgaggtgtgggtaacattagccatatgggcctaccacctgaaactgtaaagaaacagtgaataataaaatgtcatcaaaagtaggagaataagaatgtcattgtggcaggaaaacattcaaaaaccacattaaatgctatggttcacaatagaaggacatcctctatgaagtttaggaatctttcttctgaggaaaaagaaatggaatggcaaatcagatgcccttccccttcctgagggctgtgtcataccgattgatgggaaagaacaatgaagatttaccagagagaagcactcccagtgtattctgtcagggacctcaggagaccacctagacttgggccttccgtgggtcttgggcagtgcgtgctctgatgaaagggtttacacaaaaacatggggtctcagttgtggcataaattgtccttgtagaaagagtctgggcaggagaatggctggtcattgtgacctccggtgagggctgaggacaaattgctagaaggcaagatggatctcgggtcacttctgtcagtcatgccaaagtgcaactgacttcctacacccatggctggtttctgactcgcctttatcagaaacacttggttccaggccattattatgtttactaattccaggggctgcagattttggatttaggtataaccaatataaaagtaaattactttattctattttgtttcacatagtttgagctatatcagtataaatctatgtgcacatcaagacatttttaaatatccaagaagaaaaaaatagaacgggagcttatgaccagactggccattcctgagtacttcagttcccaggtaggctgggttcgtggggctgctagtgaatctggtatctcttcaagattctccacaggaaggcctcatttcctaggtttttgtgaaaaagaaatgtcatctttcatcactgtgctctctctctcatcttcaagttattcctaatggcatctaaccaaatcttggtggagataaggatggtgaaaggcccataaaaccacaatttagcaggaagagttaaaggaaatggcaatgtttaaactattatgcttgggagtacacattaggtctcctgacatatgtggaggcttctgagaggcagcatgctgcatatctgtacatagtcttcagaaagaacagataaagttcaaaaacactaagcatttcctcgaagcaaaaaatagcattaaccagtaaatttctctctctctcctgagattgttaagcttagcgttctggtaatgttttactgcattaccaatgacctcaaacttagtggcttaaaataacagttaacaacaacggattgcacattttaaaatagcttgaagtggggacttgaaatattcccatcacatgaaaatgatgaatgctcatggtgatggataccctaaacttcctgacttgatcattatacattctatgcatgtaaccccataaatatatatgtatattatatatcaatcaaaaattaaaaaccaactatttaatcctatctcatcatttggtggaacaggaatttgggcaaggctgggcagggtgattcttaagtgacattgactgaggtcacttggtggtgttcaggtggtggatgggctgatctggagcgcccaggatggcctcattatcaggtctggtgccttggcggaggtcgctggaaggctgagctcagagcagggttgaagtgtgtatacccgtggcttctccagcatgggagtctcagagtagttgagcctttaggcagaagctcagggcttctacgaagaggatttcaagagaaaataagtggaaactgccagttttccaaggcttggagctgagaactggcagcattgcttttatcacattctttcaaagcagtcacggcccacctaaaatcaagggcaggagagggaatgtggtccccatttctcaatggaaagagtgacaatcattttatggtcatttaaaatctgccacctttataacaaatcctaaatctggtggtaacatatttttcatattgtaccttcccactgtctaaacttgctcaaatcagaaaagagaggaaagaatcctcttcgtttataggtacatgctgtttactaataggaaatgctcattaggaccccttatgttagttttgggactattgaaacgttacttaggtaattatgtaagtcctagaacaatgattagtgtgaaaatgaatgggagttcatgagtagtatcaacagctagtttaccaagtatcttttaaaaatgttcattgtctttagagctagaaaatgctgtgtataattcctggcaattgaggtgaacacagtttccctgtcccttttcccgatgcaactgaggcgctttgtttctcatttatttgtttgtttcgacaaagtaatttcttacagacacactaaaaggctttttgtttgtttcattcttatgtagaaaggaaggtgcttgggaaggcaaacttgagtctgaatgagttggggtggtgagaacagaaggacgaacttgccttaaggtgtgaaggaatgtctctagaagcagttcatttcttttcgatactgggttggagagaattttgcctcaaagacagacataagcatgacctgaggggcaagattctgggtcttcagcgctacctgctcatggtgattttacttggctgccctagaaggaacttgtctgtctacacttctatagtttctgacatagacagctctctgtctctacatgctatctctcccactttatccacttgagcctcgtatgtctcatttcccttccttgaatccaactgtggccacacccccattctgacaccttcttcactggcctgagttagggcattccaccccctactttcttggccctgtcactccttgagccacgcataacttttagttttgtatctagtttgttcctagcagcctctcttagttctactctacaatacagacgagaataaacaaattctcatttcgggaagtgctccaactctgacccattcctgcgttttcggccccacctcttctcactggacacttaccatctctccatctcaagccagttgggggccatgttcatggtcttctctctatgttgttacacgagctcctctttgttaaatggtctccaacttacctattattttttcaagattcaatctgaacctttcctccttgattcctgggcacattgaggaaggcttctttagacatctttctgtcttcattcctatggcaccctgggcatagctctattatttggttgtggattatctgtttaaatatcttgctactcctctgctttatgaactctttctgggcaggaaccatggaatttttatctttgcatccctgttctctaaagtgatacctgatgtgtgcacgggtggattgttggaaaaaaaggatggatagatggcttggaaggctagatggttgtctggatgtcaggggatggctggattgtcgaaaaggtgaattaattgatggttgggttcgctgacgattaactttgtaataacattggacgaatgttcataggcagtgactttccccctgggattttgtgacttttgattgccaatgagtctagcacaaactcaatttcccatgacatttctaatacaaatttatacatatttttatttgttgttctactgcagctcttcaaagcatcctgaagttggtcttaagccagcattcttaaaactctaaggaggcaacaaaagatttaaacagtgtacagcaaatggtgactctgaaaccagagttgtttcactgctcactgccaccccgagattgatttgccatgatagatggcttcctaggctcaattaggttcttaattatggagatagttatatttacttctgtcacagggctgatgaggtgaaatatttgcaaaacaatctatctatatctatctatatctatctatctatctatctatctatctatctatctatctatctatctatctatcatcttatatgtgttgttgttgaggttgtttgagatatcccccaggagaaacagaaatatttatgtttcttatgtttcccctcttttgtctttgaagtcccaaacaccaataaggatttgtttaaaaacactgaggactagcacaggtagagactcagggagagttagaactcacagtcctgctgctacctgagacacattgcttgttatcattgctaaatcataactcttagagccatagcattaatatgtatgaaatcctagctatcaaagggaatgggctggctctaagggtaagcatgacaaacaggttccatcttgcgtgccagtttctttttttctttcttttattttgcaaatttttattttttaaaattttagttctatagatttgcaagagcagtgcaataagtactcacatatccttcacttacattcaccagttgttaatgtttttttttctcagtttttattattattatttataagttttagggtacatgtgtgcattgtgcaggttagttacacatgtatacatgtgccatgctggtgcgctgcgcccactaactcgtcatctagcattaggtatatctcccaatgctatccctcccccatccccccaccccacaacagtccccggagtgtgatgttccccttcctgtgtccatgtgccctcattgttcaattcccacctatgagtgagaatatgcagtgtttggttttttgttcttgcgatagtttactgagaatgatgatttccaatttcatccatgtccctacaaaggacatgaactcatccttttttatggctgcatagtattccatggtgtatatgtgccacattttcttaatccagtctatcattgttggacatttgggttggttccaagtctttgctattgtgaatagtgccgcaataaacatacgtgtgcatgtgtctttatagcagcatgatttatagtcctttgggtatataccaagtaatgggatggctgggtcaaatggtatttctggttctagatccctgaggaatcgccacactgacttccacaatggttgaactagtttacagtcccaccaatagtgtaaaagtgttcctatttctccacatcctctccagcacctgttgtttcctgactttttaatgatcgccattctaactggtgtgagatggtatctcattgtggttttgatttgcatttctctgatggccagtgatggtgagcattttttcatgtgttttttggctgcataaatgtcttcttttgagaagtgcctgttcatgtcctttgcccacttttcgatggggttgtttgtttttttcttgtaaatttgtttgagttcattgtagattctggatattagccctttgtcagatgagtaggttgcgaaaattttctcccattttgtaggttgcctgttcactctgatggtagtttcttttgctgtgcagaagctcttgagtttcattagatcccatttgtcaattttggcttttgttgccattgcttttggtgttttagacatgaagtccttccccatgcctatgtcctgaatggtattgcctaggttttcttctagggtttttatggttttaggtctaatgtttaagtctttaatccatcttgaattgatttttgtataagctgtaaggaagggatccagtttcagctttctacatatggctagccagttttcccagcaccatttattaaatagggaatcctttccccattgcttgtttttctcaggtttgtcaaagatcagatagttgtagatatgcggcgttatttctgagagctctgttttgttccattgatctatatctctgttttggtaccagtaccatgctgttttggttactgtagccttgtagtatagtttgaagtcaggtagtgtgatgcctccagctttgttcttttggcttaggattgacttggcgatgcaggctctcttttggttccatatgaactttaaagtagttttttccaattctgtgaagaaagtcactggtagcttgatggggatggcattgaatctgtaaattaccttgggcagtatggccattttcacgatattgattcttgctacccatgcgcatggaatgttcttccatttgtttgtatcctcttttatttccttgagcagtggtttgtagttctccctgaagaggtccttcacatcccttgtaagttggattcctaggtattttattctctttttagcaattgtgaataggagttcactcatgatttggctctctgtctgttgttggtgtataagaatgtttgtgatttttgtacattgattttgtatcctgagactttgctgaagttgcttatcagcttaaggagcttttgggctgagacagtggggttttctagatatacaatcatgtcgtctgcaaacagggacaatttgacttcctcttttcctaattgaataccctttatttccttctcctgcctaattgccctggccagaacttccaaccctatgttgaataggagtggtgagagagggcatccctgtctgtgccagttttcaaagggaatgcttccagttttggcccattcagtatgatattggctgtgggtttgtcatagatagctcttattattttgagatacgtcccatcaatacctaatttattgagagtttttagcatgaagggttgttgaattttgtcaaaggccttttctgcatctattgagataatcatgtggtttttgtctttggctctgtttatatgctggattacatttattgatttgtgtatattgaaccagccttgcatcccagggatgaagcccacttgatcatggtggataagctttttgatgtgctgctggattcggtttgccagtattttattgaggatttttgcatcaatgttcatcaaggatattggtctaaaattctcttttttggttgtgtctctgcccagctttggtatcaggatgatgctggcctcataaaatgagttagggaggattccctctttttctattgattggaatagtttcagaaggaatggtaccagttcctccttgtacctctggtagaattcggctgtgaatccatctggtcctggactctttttcattggtaagctattgattgtgtgccagtttaaaatcaattgctagttgctacctggaaatgagaaagattctgaggtcttatctgagctacaattgttcagtgatgtctgccatgaatataggatctcctatacgtgattatcataagaccataacatgtgttcgttatgctaggtctccatgctggctatccactgattcaccataatggttcataagattatttatgagaaaatatctacagagattttatagtttctggaagctggtttttgaactaatatgcaacttgatccttcagtgaatatagttaataaaatgtagaaagagagaggtgaagaaaactgtgacattaacacctgttagagtcattttctttagaggataaatgcttgttgttttcctatccagggtgggttgtctactgcggaggaaggatggtttctcaagaagttgtgattagtagtgtgttatattgaaaattaaaagcattcacttctgcacagatgcaaatataatcagtttaactttattttaagcttctattacattgtaattaataataatatactaagttaagccagtttaactgtctagcaaaatgcatttcattttaaaattggatattgggagacttggcaaatgctgtgagattacttagtaaagttaagtatgatgtatatatagaggggaccagctcaccctcataggttagtgctgaaggctcaggaacagtctcaaaggcttagaaatgtggttatatagaccagagcattccattctgattttgcccccagtatacttatcactgttcattttttgctaagaatcacagtctactgacctaaatcacaccctagacatatcagagggaaattctgaccataaatcagccttgcaaatacatagcaggcagccttctctgtagtagccttggaacataatacaaatgatgtcagcatcctctgtggttgggtcagaactagcactggctatttgcaaggctgagtccatattacccttcagcacctgagtgccaagctgaggtctcaacatgggtgatgtgaaggacaagagagaatcagtggctgcagtccttctatatatctggtcactagatccgccagcttcttcaacttgttgggcttattatatctctgaaaggggacctgaacctgcatcattctgcaaaggagatgattcctgagagatgggtgaaatataatcactaactaaagagataaattcttcactttacttcctagtattgcatcccagaaagggttaaagtaagggatattggctcctgctgatcaggccacagtgtgacacattctataaaatgcatcacaaaactacattattcaatagacttgagtgttgcacctgctttcttatctccttgtaggtggttaagtttcccacaaatgcaatttgttaatatggggccacctcttctaacaaggtaaatctaaaatttggcaggcatttgcttggctgcaggtgcaaaatgaaagatctttttctggctttgccaaaaataaaaattatgttgtgctctagtcctgggaaaaatattctcacatggagggtagaacctgaccccgagaaaggggactggaattctagagcccaaatcatgtgctattattcccaaaaggctgagtggggaatctgaagtcttgttttaaatgaggccaggtattgagcaaatctccctggtaagagagcccactgatatttggagatgtagccatttgtgatgataaatgatgactgttactcttatgagctatgagagcttaattaaagctaatgcttagcactctttggaaggtggagagattaaaaactaacttccttgccgaatagcctgggtttggaaaagcatgtttttgaaatatgtgggatctccactctggggccctctgcagtcctgtctgggtcttcacacctaagtcaaagcaagagctatttttgcgttagaatttccttagccaagactacaagaggccaaatgccagggttcatctcagcttcctgtgcattcacatggaaggtcgtctttgaatctgcacgtccagctcgccatacacatgtctcagggagtcactgctcatgctggctatcagcttccgatgcccagagacccagggccggcacacttcttcccactgcacggtggagttgggccggatttcactgaaaggatggaaaagagaggagaggttggaagatccagctttccactttgatcaggaagcaatgaaaactcttgcctaagtcacttgctttctttctctcagttggtgcttaggacactgaagactctcactggctgattcagcaagttatgccccaaatgaggcccccacataaagctctgcagaacctgtcactgacagtcttattgggtcatggttccttccactgggatgcatccgccagcctcccagtggccatcaggagctgggctgattcccatccaaccattaatcaactgaactctagcttgtctccaagccctccatagtagccttatctatgtgactgatcttctgagcctcagctcagtttttgccactagtttcctcctggaattacagtcctatatgaatcccccagctgcctttgctgaggccctgacactcgaattagcttttgccaactcccttgggatagaccttgttcccaggctcagcatctggaatatagccctgcctgctgccatttgactttgagaatcttcatgttctgtaattcaaattcctatttcaaccaccaaattgggcccctccacctatgcaactttctgctaccatttgttgccaatgccctaatgtatgcggctaatgacatagcctttcatggttctagtgttctcctcttcctcccagcctttgccctgaagtcttcctgagtgtcacgaacaagcccacatcagtgcagactgagactaatcagggttggtgagatttagtgttctctggggtgcttcacatatagcctcccctataaaccttgggagattatattcaggttttatatgtatgacagttctttgaggcagatactattcagcagattttatgatcaagaaaaatggaaggtaaccagtgaagtccctttttcaagatcacataattggtaaatgggcagagatgaaatttgaacccgggtttttctgagtcccatattcatactctttctgctcctcttcactgcacttcataaaagtgtacaccatatgttctataagaaaaggctttttctaagatatttgcacacacatatttatagcagcacagtgtgcaattgcaaaaatatggaaccagcccaaatgcccatcaatgagtgaataaagaaattgtggtatgcatataccatggaatactactcagccataaaaaggaatgaaacaatggaattcacagtgacctagatgaaactggagaccagtattctaagtgaagtaactcaggaatggaaaaccaaacatcctatgttctcactcataagctggagctaagctatgaggatgcaaaggcataacaatgaacaatgacgcaatggtctttggggactcaggggaaaggtgggagggataaaagactacaaaatggttacagtatatactgcttaggtgatgggtgaccaaatgtctcagaaaccaccaccaaagaacttattcatgtaaccaaacaccaactgttccccaaaaacctatagaaataaaaaaagaaaagaagaaaaggctttttctgaccattgtgcttactttttcataggttttatttctcaagcaggaaagatactttttgacttagtaataagagtgtcctggaagtgttcatggaggattcattgaactctttgcaagataatttaggaaagtttctcctgcctgtatgcagagagaaaattctcagtgctcaattcaataccaatataagtttgggatatttatttctcaacagctgtgctattgttacctgtatccattcattctctctcctctggttcccccaagtgatcaatcagaagcactttgtgaaacagtggccctggttaaggacccgacctgagaccatgtactgtagataaccacctcaaatagaagctaagtatttagccccctcttatcattttctcttactcataaaaccatccggcataatgatgtgtacatacgaaaaaactcatacatgaaaatactcatacatgaagatacgtatgcatgctattttacatacagataaattcataacagagaaaaaagtattttgataagtggagcaatgttggagtaatcctattttctggggatggatgttgtgataaacgattctcagtaacgtgctgagccatcaggagataccggccatttatcatcttgaatgcacgcaggcaaataagattattattacaataaactgcaactgcccatggtttgtcctctgtgcgtctagaccttagcttctgtcctatttgagaaacttaaagtttaagcccaaatcacaaagtgggggagtttttctcttgaaataacatattgaactggatcattttctaaagagcaaaataaatctggaagataaattatttgacgctctggaagcatcaagtgcagaaagttaagagtctgtggaggtggaacctctgcacatctgagacaggccggaggcagtgggggaagagcaggaagataaaccatttcagagtagagttggctcactgcgagtgaggggtgagacacagcaccgccttctttgttcctggctccaattccctgtttaccagctcctcaccttccaggccctctgctttgggttcaataacccctgccttctagacaccacatctggcagggtgtgggtgaatgagtgggggtggtgattccccaactatttaagagctgtattctagaaagaaatacggtcttgcaaaggattttggttttgtggaattgcactttctaggcgtccaagttgttacatggatctggcgctcctagatcagatcttggcaacatagggcacagtggagtgcttctaattatctgaccatatggaagtgggcacggactggctcaggtcttggttgtgaaggtgtgtgctggagtgaggagtaaacagagaaagtggcacttgctccaagttgtaagcccatcttagataacaaatgttttctatgtcatgatttttagcccaagttttgactgtctctgagaaataaagcttctcttgtctgggagatattccaccctgaagctgggtttctgtaactattcagccataaaaagaataaaatcctgccatttgtaacaacatgaattagacttggaggaagggcatcatggtaagtgaaataaaccagacatggaaagacaaatactacatgatttcactcacatgtagacactaaaaaaaaaaaaattattataccatagaagcaaagagcagaacagtggttaccagagactgaggaggagaacatgaaggggaagatgggaagaggttggccaatgagaacaaagtgacaattaaataggaggaataagttctggtgttctattgcatgataaggtaactatgattaacagtaggtattgtatattacaaaagagctagaagacaggcttttgaatgttctcaccacaaagaaatgataaatgcatggggtgatggatacactaaatactccgatttgatcattatacaacatatatatgtatcgaaacatcaaattgccccacataaatatgtagaattacaatgtgtcagtaaaaaaaacttaaaaagagagattgaggactgttacggactaaatgtttgtggtcctcacacattcatttgttgaaacccaaactccagtgtgataccatttagcgatggagctttggggaggtaactaaattagaataggtcatgagggtggggctcatgatgggattagtgcccttcgaagaagaggtgccagagaacttgccctccctctctctgccccatgtgaggacacagtgaaaagacagccatctgcaagctgggaagggagccctcatcaggaaccgaattggtcggcaccttgtcctcagacttcccagactccagaagtgtgagatataaatgtttgttgtataagccacccagtctatggcatttctgttacagcagctcaaactgactaagagcagctagctctctgtctatctacttgtctgcctagacttacgtgttgcagtaactactaacagtaccttaagccagtgtgtgggcaggacatctgtgtccaagaagggactggccttatccatcctttctcccgattcactccactttgctccactccaatgtcagacattaacaataaacaaaccatctggagatttaacctattttgagcctgaggcctcccaaatagtgggtcattgcactgtgtaataattcactgtgtaataattcatcttttgtctaagacacacagtgtcttttttcatgtgttggccttgaccaaggtggaattctagggggatagccaaggtgtaaagatagagaagtttccggtacactcagataaagcttgtgggtttactgtctgggaaggaaaaagttggatacagcagggggctgtatggaagaggaaacgtgtttcactttgcctgaacgattcttgcatctgatttgagtgggaaggtgcgagaatgggtgagtgagactgtcgtttctgacgaaagcaggggtatggctgctgacctctctatgtagctggggttgattactaatttacttatttttttttcctgtaactttcctgttagcacaggaaggttgctatgttttgtgcttgcgttgtttcaaaagcactaagattattttctctgttgtttattgcatctgcaataaggcatctcttaaatgatgagatgcagaagctatgagcattgtaatttgaaagaaatgcggagagccctttatgggcaataaagttgccccagagggtataagtgaggccttgcatttatcccacagattccagagtggggtcgcttccataaagggtgtcgggaaaattcttgacatatctggtcatgaggcagtttccaaagtcctctacctccctttctatgccttagaaggtcactccacaggaaatgtgctagattgattgatgctgacaaggacttatctgtggtagaaatgaaagtaataaacctcaaagattgggatccattctgggtgtcacactttaagaggagtagtgacaaattggaatgtgtgggagagagagagagagagctgaaaccatgttagaggagagggaaataaagtcaggacagatatttgtccccaggtagaaaagattcaaggaagatgagacagctgtttgcaaacatttgcaaaccatcagatggaaaagagatgggccttactttctgtcagtccagatggcagaattaggatcattggcaggatcaaatggtagaaaaacctgtttccttactgttagagctacctgaccatggaatgggttatcttgttgggtcacactctttgttagtagaagtcacagaaactgagacctgtcaagcacaatttgaagtggcctgtgtgtggaagaggctgagtttcattcatatcattacagaacctggggttgtctttggtcccctgaatggggaaccatctagagctctttaggctcaactaaaaaaaaacctgaatccaacagttgtagacactgattgggatggtaaaatctgtgaggtgaggctggagacaaagcacccatgaaaagggggtatctctcagcataatatctgacacgtggtaggagctcaataaagatgagaagagaccatacgtgagtaggtagtacagcaaagtggttcaaacttgggttctggaattcaccagcctgagtctgaatcttggctctgttttcataaactgtgtaactgaacctgtgtaaccagtcaacctctcaaagcctcaaattcctcagctacagaagggagataatagcagtatctacatcgtagggtgtctttaaggattaaatgatgaaagtgctggtcaaaccaaccctagttttactccacgccctacagaaatggtcggcaaggaggaggcagcttccaagacattttcactggggagcagatctatgtttggaaaagacacacacagagaaagcttcccacagccctgcactgcctgcccggtctccccaacccaaggtttaccggaacatcttcttcattggtcttgttactccaggaccatccaggtgtacccagacatttcgcagggtttcttttaaaggattggtaaactgaattgtcacagtcatgtcagaaccaactacctgagtgccacggacctaagagagagaatgcaggtcattagcagcaaataaaacctcgttctgctctcttgttgtcttaaccatcatcacttttactagagttttatgatacagttatttttttggcaatggaaccagtgtgatgaggatagctgattgctttgactggaggatacctattgagaaagagatggaaatttactaattagaatcgcactcttttcctcattataaaaccagcctaattagagctcaggtcaatagcggtggccactgactgctctttgacagcaggagggggatgttcatttggtgtggcaacacgtttccacggtgagggcggccaagtgaactttgcttctggataggcatcaagtttcctgctggaacaaaggggattcctgagtttaagaagtagaaaatgcttcagggcacatgtgccttcttagttttagacacattcgcaagaaatatgccaaggatggagtccttactgttgaacatgaagaggaacctggatactaaaataaggaaaggagatttttcttctacagccacagtaccagagtccaggaaaataaaaggttatttgttggtgagttgatctattatgactctcagaagtatcaggtatttggaagaacaccacaggagacagccagagctcagtgccaggttcaacacttattaacagtggggactcaggtgatttaggctttctgagactcagttttcttgtctttaaaatgggctgacacttttatggggcgatctatgtagaatgctcttattattactataccttaagctgtgtttactgtatgccacacactttagaaccatatgcttttccaacataaacgcaatgtgccgcaaaatgccaggtggctataagacttgtttgtttgtttaggagctatgtataccaaatgaatggatctgtataagctctaagtaacttgggaataagataagaataatagttcttcccttgcaagaaaggtttggaatgaaaaatgctcataaaacggcaaacatattgcaaggcacatggcaaaggcccaatgcattacagttgatgctttttagggtagcaatgctctgggtagtttgtcttattcaccttatatttcagcccacttttaactccaatacttagtacttcaataccaatgtccagtaaatatttattaaattaagtcaatggctcaaaaatggaatttactggatgtctggatcttccagatgacaacacagccattactattccatgttcctttagccactatataatatgggagaaaatatatggaaatgaggcgtttttaagaatggacgtaaagaggaaggacattgcccagagaagaggacccttgcttacttatgctacagtcaagaataaaatcttcctgatctgatcattacacactgtatgcatgaattgaaaaatcacatgtaccccataaatatgtacaattattatatatcgattaaaagaagaatacactcttatggctttactcatcaagccatgctttgtgactaaatttatggctatgggatttcttaagtctataagaaaaacgaaactttcagccaactccctaaactttgttacatttaaatccgcatctcctggagggcagtggtggagagctggattcaggggaactaggagaggggcagacgatggtcatggtagcaacaacagcaggtgcacctagacagcatggatcgtgtgccaggcagggagtccagcactttaaccagcaatcctcagtctggtaatgggtggatcctgtaattcatttatttgaggcacccctgttgattacaaagaaccagccccagctgacaaccataattcacatatattctcacataagcctcacaacacaagggctatatttgtatcagctcgatcagactataataatagttattcccttaagaagaaggaggttttctagggcaggatcactggtgccaggcatttcattttataaaagagaaaactgtggttcaggaaaataggtaacttgaatgaggatttgaagctgccaaatgaccaaggtgggattgaagttaaagtctgtctaactggagatcttgaactctaagatagagtgctactctgaggtcagaggagctggaaaagccaacaactcagcaataacaagacaaccaaaactgtttcgtactgacgtccaaaaaaaaaaaaaaaaaacggcagtcagaaagtaagggagattttcaaaccggtgggagcaacattggatttgaagccacactgacaagactgagaatggataaggcctaatggggaggagactggttcaatgacaggcaaactagaacatgaaccagaagttacttttaggctggctggcacatggggtgtggagagagaagcctggtttgaaggctgtggcaaaaacagtaatcatgatctagatcagggcttctcagcatcaacactactgacatatcgggctggatgcatctttgttgcagagctgtcctgtgccaggtacgatgttaagcaacatccctggtgtctacccactgcatgccaggagcagccccgcaccccagccatcacaaccaaaagtgtctccagcaattgccaaatattccttagtaagcaaaattgccctccagttggaaaccactggtatagacaaaacatgtggaagacagactgaatttttcactttcttcccagaggccctgcctcaatcaatttagatattgaaggtgtagcaatacatcagaatactttacatggtgtccctgatttcattctcaagtgtgtccaatatattttttcctgcattaagaaacatttcaaaaacatctttggatttaaaaaatacaaaataaagatagcatttacaaaagctctctaaactgaagaagatggagctgccacagagacattattggcaaaagtgtttgctatgatcactatattctttctggaaaaaatattttggagccatctgtcttctccatggtatgctatataaggatgggcataagccccttcaaaagtatatctgatagtagctactgacctttcctctacacagacatacacagtgacaaatacaagatatatacaatatgggcatgtatttttaggggatgcactatagacctatgaagtccatacatggttttctaggggcccatgaaccctagattaagaacccttcccataccagtagactggctctacatgaagcctcctacgctgtggaaagtgaaatacacccttccaggtcactgatgacagtgagaaggaatgcttagtatttgagaaactggcccatgcaattgggccatcatagataggcttcagatctgaatatgttcaggacattaaaccttctcaggtaatttcatatgtcatgcctaatcagtttgcttccagtattgtctctgtaattagatgctggcatgggtgtatcaattctgcccagatttccctgatgctggagtggggagcagggagaaggatggggaggggtgagaggagaagcccttctctggttgtagtgtgtttcttttgcaattaacaaagaccagtgtcccttttctgacacttgtctcctgcaccgagaatgtaaacttcctgtccctgactactgatgataatgagccttagacactcaaaccaaactaaatgtaaaaacctacccaatgctcgacatcactgtgttctgcttgggaaatgtaactggaggtgtctccctctccttgcttcttttgaggaaaatgctgccaacacatagtgttttcacgttatgtgttgatttcagtgatgcaccatgctatggtacctacaaaatgctgagaacaatgactatttggggagaaaatatctgtttgcatcacattattttaggaatctgcaaagctcccttttccttattgctgaaagcataattccatatctgcatagtcatattttcatttcattttcacagtcatatttttcattttcttgctctcataaaaccttaaataaagggagccttcaggcaatttagagaaggttagttcaagaagaaacttttatgtgtatttgctttagagaagagtattcattacttgggccagagaaaagaataaagcatatgtcttacttggtgacgtcaaatgcttttgcatatacttgatggccttaagtttttctcaatattctattgaaaatatctctctctgttttaaaaaaatcaacccgtagtatgctttttcaagttacatatcacttactgatattgacattcctgtcctttatactaattcatgataatgagctgctactctgattctttggtaaacaagaaagttactaacacacacatactctctttctcttatataaactttttggaaagaaattacttttttagaaatcacaagatatcttccactaagcatatgctttaaaaatacataactgtattcaaaattgaaactgaaatgaaggaaaaagtttgagaaagagtaacaataagtgaggttggcaatttgaaatacatgatttattagcacacctaacagctcttatttcaagtactttcaatcatgtattgcacgtatttctggaaactgtatttttccctcccccttggcctgtgatcatttttgataatgggcaatttcttgtttgcaaactctgctcatcaccacaggcactgcccctgcttttagctgacacttagatgaacacttactgaccaatgctaatggttctagggtggttaggaaatgttctcagtctatatttttccaatatagtagccactagccacctagggctatttataattaaattaattaaaattaagtgaaatgtaaaaaattcagttcctcagttgcacgagccatctttcaaggactcaaaagcctcatatggctcgtggctactgcattggatggagcagatttaaaatgttcccattaccctagaaagttctatcaactcacttaatcctcccaacactaagaggtaaatattaggagtcttcattttatagatgaggaaactgaggcacagaggagttaagtaacttgctcaagttcacaccattagtaagtagggtaggagagattcaaatgtagacagtctggggccatagccgttgctcagcaacacgtgatcctgactctggttaatgacaacaataataacaagtaacttacatttatttagttagtgtttacttagtaatgcaggcattctgttcatcagtttacttacactaccttatttaatcttctctacagccctatggtcttgggggtagacatgattattaatcccattctgtttacgtgaaattgaaatttagaagataaataaaaagcctacagagttaggaatctggcggaagttggatataaatccaggtctttctgactctaaaacattcatcttcaaaactacatatactgtgatccctgacagaatacaggtaaaaatagaaacttttttttttgctggaatagcttctttattttctgaaatccagcaaagaatcatttgcagcatcaccttttaagttatcgctaaaccatcagttgaggacgaggattataagttgaccctaaactaaattagaaaacatctataactcacctctctctttttgactttatagagaaggaattagatttctatgccagagtaaaatgtgacaaggtagccttggggccttgatatatattacttgatgataataggagtcactatctaggattttctcttttaaaaatgagagatgccacttttaaaaagagaatcagtagcccaaacatactgggattacaggactggaatgtgagattggttattctcatgtgtgtctctttttaagattcaaaaaaatagcaaacatgaaatgcacagagcaaattatgttttaggtaccgcagttaccagtgactcctcattttcattctaaaatgtgtactgttctgtagctgtcctgaagagagagatggaaatgaacaccttcgatgaggagggctcactcatagacatagtttacgatcatctatcctggctaagggcacccacggtttggtcccacggccacaatcctctgtgaaagtagccacgaggggatggagagtcagctatgggagcagggctgaaggtgtcccctcctagggtcccctggggtaagcaggctttccttgctcagagtccctcaggactcataggtagatacctctgatttactccacaaataacctgaaacagtgtcacggacataactgaggtgactgggatgcacacagtggtgctattccaggccaagctgaagggagagcaagctggatgcaggggctgaagaccggggctgccactttgagtttttagacaagtcgcttgacttctctgggcctcagcttcttatgcagttagtggggtgactcaatgtaatatcatacaacagagcatctgacacatactagcattaatgaaatatgaggtttaaagggagaacatgttgccagggtgaccctgagaacctcctcacctatagggtcttctatggagaatgacgtggattcggtttctcaggggttagagaagagagccacaaaggggagaggtgaagaagcccacctcctggttcccatccccggcctccccatgaagggtgtgggtgtgggcaggggtgaatcttggtgacgagagtgcgatggagccacagagagtgcaggaggctggagagagaacgtgctcggttgtggacatggaggggaaaatggtcagggttcagcaataattagaacacatagtctgttcccattttccaccttaatgaagtttgtgatatttacagcactaaatgaaactacagttaagtctcacagtgtagccagtcactgtcatgtactttgtttggggcactcattatatctcaagtggtttcccctttttttctttctttttttttttttcgagacggagtcttgctctgttgcccaggctggagtgcagtggtgtgatctcagctcactgcaagctctgcctcccaggttcacgccattctcctgcctcagcctcccgagtagcagggactacaggtgcccgccactatgcctgcctaattttttgtacttttagtagagatggggtttcaccgtgttagccaggatggtctcgatctcctgacctcgtgatccacccacctcggcctcccaaagtgctgggattacaggcttgagccaccgtgcccagtggtttccccaattttaatgtgtcctctgggataaagttgtatgaatgggatgtgggaggagtgagatcagcagccaccacagccacccacccttccttggtccatcccggtgggtttccagggtgtgagccgtagggagactgaagaggattctactgttaacctcggtaaaaattgtgggcatctcatgaaaagctccagttagaacacaacattaggatggttgttaagaaaaaacaagctagtgtcccaagttggaagagatctggacatggggctggagccaggatgcaactgtgcaaagtggaaaagggaacccccttttttggggggatgtggctccatgccaggctgcagggcttgatggttggcgagtgggctggactgggtcccctcactgtctccttcccacctgcagatgggcacaatctgcacaggggtgagtgctggcctggagggaagccgcccagaggaaggtccctgcctcctctccggggtcaacagtgatacttcccatggatcttgtgttatctatacaattccccaccaatcagtgctggtcatgcagatattctgcttgttgaagtcgatttctgtgggttaagcatctttcacaggccccatgtacactgtctttgcaagaggagcaccccaggctctgtgtaagtgctggttagctcaggttaaaacagagcaactgcactcctggagctgttccaggtgggccagtgctgaaagaaagtggcgcaacctttccccatttcagaaaaatgcaacaaaaatgttctcactgttggccgggcgcagtggctcacgcctgtaatcccagcactttgggaggccaaggtgggtggatcacctgaggtcaggagttcgagaccagcctggccaacgtggtgaaaccctgtctctactaaaaatgcaaaaattatctgggcgtggtggtgggcgcctgtaatcccagctacttgggagactgaggtaggataattgcttgaacccaggagacgaaggttgcagtgagccgagatcacaccactgcactctagcctgggggacagagtgagactccatctaaaaaaaaaaaaggaaagaaagaaaatgttctcactgttgaatttttctctgataatgttttgcttttgttttgttttgttttttgagtcttgctctgtcacccaggctggagtgcagtggcgggatctcggctcactgcagcttctgcttcctggattcaagtgattctcctgcctcaacttcctgagtagctggggttacaggcacgcaccactacagcctggctaattttttatttttagtagaaacagggtttcaccatgttggtcaggttcatcccaaactcctgacctcaagtgatccagccaccttggccttccaaagtgctgggattacaggtgtgagccactgcacccggcctctctgataatggttttgaaagctctaggcatttgctacaatttatttacagagtgggcaccaaataactatatgaagaatggatgaatgcaagagtgactaaataaagagataaataaaaactagaaagtctttcagctaatggacaaaataaatacagagcaaacgcttacttttaaaaactcttggaaacagtcaattgtcctcattttaaaagctttttttttttttgaaaaatttggagacatctgtttgcttatgcttgtaactttaaaaatcacacacataaaaaatggttatgttttctcctagcaaaattgttcctagttcacatgagaaaattagttctattggtgcttcctgacatcctgcaaaggctgcaggactttttccacatgataataccacacaagtgctggctcctgagctgctttagaatggcaggtactgagtagagatcattggaggaacatgtgagtgtctcctctctcccctaggccttactccaggatctccaaggcgggcctccctgcatgaggaaggccccattccacagggaatgctgcatacactcaacacctggtgaccagagattcaagagattccatgccactaggtgagggccacactcaggccactggcccacttcaggccagtggcccacatgctgccctaagcaacccccatgcattgatgggactacagaggagaaagaacatttaccaacagctactaggtctggacgtgggccatgcattctcacaaacattgctacagatgtcaatccccccagtgcagtgttttatatgtgactgtacttaatagaaggagcagtataatcatagtgtattcactttgcaaaggggatactgaagttcagagagaggatgtgtgtgtgtgtgtgtgtgtgtgtgtgagagagagagagagagagagagagagaacaagcaacacatgggaaggcagagaaaaattctatgtctgattgtaatgaaattttcttttctcatcaaaatattttgatagcatggggaaagagacgtgtgctcattaaagtttaatgactgtctctctctgcctgtttccatgtgaggatcacacactctgactcacacatggtgggtgctgggaatggttgactgggagcactattgagcccaggccccatctttatcaccacagggaccagtaaaatccacgactgggtccactgggatgcacaaacaggaagccactggcctgctttggttgacggtgacttggattcagacatgtgagcccagtattgttccagattggcctagatttgatctaaaggggaatcaggtaagaacagctggaaactagcttttaggaaactccagttccaaggctgagttgggtacttcctggagaagacaatgctttgggcaaaggctttgaagagaagggaggaagaaaaagcggctccgacttgtgggagagcagagttgacaatcatgttacattcccactctagaaactcccttgaagcctctttgttcagagagtcgatgataaagctctcatccaaaattgtagactcccctccacatagcctcaagctatctttttcaggttacccttactcatccctgctcccagcctccaccccagccaaggcacgcttctcactgctctacatactgccgtccacctcccctctagcccttgctaacattttcttcctagtatctgaaggggtctctccatccatctctactggttgaacgttatctgttcattggagaccattcatctttctacagtcttaattcttgatgtcccacaccactcaagtgtgtgtgatctctcctcccttgaatacaaaactctctgcaaagtcaatgaccacctctgctttttgtgatagttccattgtagcccagcggctgccagcacaggcttccaagtcaggaagacctgggccagaagtgtctctccttccctcaacaggcacgtgatcacgggccagttactaataaacagcaataatggcaataatagcagcaaccaacatatgtaggtgtgcactgtgactcgggcatccaatgactcataaaaaactcacaaggaccccaggaggagagttaccattgcttttgacttacagatgagaatgcagaagccaacagaggtgaaatgatctgtccaggtttacacagttatgatgttcagaaaacaagctttaaactcagatgatttggttccagagcccatgttctgaccactgtgctacaaggcactgccttctctggtcctctcagttttctaatcagtaaaatagggttatagtaacgtcctccttgtaggatggtatagagggttaaataagatcatagaagagaggcgtttaataatgtagtgcttaataaatcatagctgctgtcatcataatcaccaggggctggtcccaacccttatcttgactgagctgagcaggaagggctgtggtctcctctctgtctctcacataatttcaccctgtgcctggcacatttgcccacagcaaccttgaggctcagtcagttgtgtgtccatccaggctcaaagaggttgaaaaagggtgtgagcgttttcttagaatttagagaaacatatcctatgtaattctggacctctgagccattgtggtttcgtacttttactgcatttagctccctttccaagtcctcatttttaaaaaaccttttattttaagttcaggggtacatgtgcaggtttgttatataggtaaactcatgtcatgagggttgtacagattattttgtcacaaagatattaaacctagtagccattagttatttttcctgatcctctccctcctcccacgccgcaccctgcaccctccaataggaccctgtgtgtgttgtttccctctatatatccacatgttcccatcttttagctcccacttataagtgagaacgtgcagtattcggttttctcttcctgtgttagtttgctaagataatggtctctggctccattcgtgttcctgcgaaggacatgacctcatccttttttacagctatggctgcattgtgtccagtctaccattgatgggcatttaggttgattccatgtgtgtgctattgtgaatagtgctgcaataaacatatatgtgcatgtatctttatgatagaatgatttatattcctttgggtatctacgcagtaatgggattgctgggtcaaatggtagttctgtgtttagctctttcaggaatggccacactgttttccacaatgattgaactagtttacactcccaccaaccgtatataagtgttcctttttctccacaaccccacgagtaccagttattttttgactttttaattatagctattctgactggtatgagatggtatctcatggtggctttgatttgcatttctctgatgattggtgatgttgccaataaccagcatctataaggaacttgaacatgtttacaggaaaaaaaccaaacaaccccattaaaaagtgggcaagggacatgaacatagatatggccaacaagcatatgaaaaaaaaagcccatggaggctataattcttaagaaactaatgcaggaacagaaaacgtaataccgcatgttctcacttataggtgggagctaaatgaggagaacttacgaacacacagaaggaaacaaacagacactggggtctactggagtggggaggatgggaggagggagaggagcagaaaagataactactgggtaccgggcttagtacctgggtgatgtaacaatatgtacagcaaacccctgtgacacgtgtttatctacataacaaaccttcatatgtaccctcaaatctaaaataaaaatagaaagacaggaaaggaaggaaggaaggaaggagaaaaaataactcttaattgagttgtgttttatacaatttatctgacccctctccctaggcctcctttggaatatttcaacttgaagttttcttattactctcctctccccgtttttctcttctcccccccattctcgctcctttttccctcttgtcccttcctcttctcttctgttctctcctctcccctcctgtgccttcctcttttctttcctctttttctcctctccatcttcccctcccctcccctccctccatccttttctcctctgttctctcctctcccctctgttcttctctcctctccctcccttcccctccctccttccctcccctgctatgactctgcatttcacctctccaggaggctaggcaggtccccagtccacaggccggagcttctgcactcagggcctctcacagctccgtgactcctgggtggtccttagggtgtgagtgctttacccaggagcacttctactccatttggatttaggttatccttggagttagttgggctaatggttaaaggacagtttatgggatgatgccccattccacctttttgaacaaacttggcatggacagaagccagaatctccatctctctcatgctctcttccctatcaaatgtccctacctctaaataagtttcctccaggaacagcatctctggttcctttgtggaaggaaacacaaaacaatataactctccatttaaagtactctctacatgcccaggtctgctaacttgtgggataaggtattctgattgtgccctggggaattaaactgctctttaagtaaacccagaagataactaacaaataatcctgcaaattaatagtgcctaaaagatgaaagttatcagtttccttcatacatccggtttattatcagtggtgcaattaaattctattttctgctgtggtttgagcacttcacagcttgggaagcctctctcctgagaccttcacagggacaggccgtcacttcataattaggtacgcacacaggccttgctgctgtcagggaaggttcagggttgagctcataaatgaaacctgcgcaatagcccagaagggtagcaaaagctgcttccaccaagcagctgggacaggcctgcagcagggggtcccacatgtctataggaagagccagctgtgaagaacagcttcggggttagggcatcctgcaccttaagctattaacttcacgttctcatggatgatggtacctctgcagcaaccctaatccccacctctccattttgcatttgtttctccctttgcctgccaaccctgcacagcctcgttttcattcttttcaggcgtcctgtgcacacaacgccatggtgggcctgtgggccatgacagaggcgaaggaaacaaagagacatgacaatgtaggcctttgtagaaaagaagggcctggtgttctgctccctgatgggcattacatgcccgtgagtttgggtgggacttgccttggggtggctcactgtgtcaattacacaggaccagaccataagaacgttcagttgaaggagctggttcccagccctgcttttgcagccagcctgctggggttggaagcccagctccgccatttgctggctgtatggccttggaggagttatagaacctctctgtgcttcagttttctcatctgtaaagtgatgccagtactctttaccttgtggggttgttggtggttgaaaatgcaaccatgtaaagtgctttaagaacagcgtctggagcccagtagttacccaagaaacactgccattctgaatgctgcacagcagtcattggctttccaaatgactcacagcaaaggattcacgagaagcaaggactacctaccctcaccctgcccacctctaggaccattaaaatgtgatcaactttataaagctttgatttatctaccactttagagcaatgtagtttagcaggatctgtgctaattgctcttaatcacttcaagaagattgttctccagagactagggaagggctctaagacctggataagggctgcatgagatgtcactcctcagggtcactgccagaagcctgggttcctgcttccagggcaggaaggcgtctcatggatgcaaccacagatgcccccagaagctacagctgtgggcctgagaagtaggagcacagaggctcccacatttatcttccactctcatcaaccctcggccttcctctgccaagtctcttgagccatttgggcagagatttctggtgatcactggagaggcatcatgaaaactactggtcaaatgggcaaaacaaacctatggtgataaaagtcagaaaagttactatcttggtgatagtctagggggttattggctgtaaaaggcaagagggaaccttctaggggtgttggaaatcctccatttcttcatctggcttgtggttgcaaggcacacgcacatacaaaatcatcatcaagctgtatattttgatctgtgcaatctactatccacaattatacctccataaacaatattactgtccaaaatgttgcaggcagtttatctacctcttatagcatgcctgacccactttattctggagacactgaaagttctaagtatctgtagccattacacatctttatcttcctccacaagtgtgtttatacccacaggttatatttatatctgcagccacatctatatatttaaatctggagaggagaggaaagtgttatatgtatgtgtctatatatagggcagtttacttctttcaaagaacaagaggatcctagcactggtattttttttttttttttttttgagcaggacattcattcacacacacacacacatacaagcacgcatatgcacacatgaacactaagtctgcgtgcctttgtctctgttccaggatgagacgctaagactgaccttgatgatgatctcagggatggttagcacggtggacttttgcttggccagaacatccctggtctcattgatgcgagctgtgacaaagaagtgcagggacgcttgttccagcagctgacccatgtactcgccggcttggatcagcaccgcctctttcttgactagtaggagaaaacacacacaggcctggcatcaagacttgagacagggtctgctttacttttctccaagtttccctacccctcccacattagcctggaagccaccaggaacacagcaaaggtaaggggcaagtggaacaaagagtcaattggggataagctgtcctgcttcttaggtaaagaatgtgctggaaatttaatattcattgaagtctcactggagaaaatgtgtcaaaccttccaaacagttcttttgctgttgtaaaagaaatgccatggaaaagatgtgattttcatggcaaagaaggaccaatgggttttaatggtggctttgatttgggccgggatcatcccaaaatggaacatgtggggtgctgaagtccaaggcccccattccacataggatcccttgtcaaataagaagtgtctcacctaggccatgggccacactcagactaaattgtcaactacctacacattttctctgtagcattccacattttctctccaatctgatatgatttttctatttaagagaaggaagctgttgaaaccagtttctaccaaaggcattcaactatctccgaacctctgtttgtgatttagaagacctctgtgccaaacaattgttttctcaatggaaaccagtcactgatgtcagatttctaggtcctggggacaagccaatgagaatggcatttggaagatggagagtggtcctggctcccctccaattaccatctgggctgaggatggtgagttctatcttgtggctctggctcactttctctctaactcccatttcccactgtccaggattctagagagcaatgggcagtttttctgtaggctgagcccaggtgtgcacccactgctacctggttggagccagatgcctgtatgtgccgacagctggcagactccgcaggtgaatgggtgactcattcctccatccccagccacagagaacagactctatgaaccttcacagaactgaatgtctttactgctttccttctcagtttctggcttttgccaaagacttccccttcctgtggaagttattgaaggaaacagcttcatggccaacagtttgagcacagagggtaattcattttagcctgctgtactgaacagcagttttgcagcagggtggggtgcctgtggatgggcatgcaccagagcagagggcagggcccctgactccccactggctcgaaggtgtgggtgcattgagccatgcccatcatctgtggaggaactctcacacctgcgatggatctgcagcagcttgctctggaccttgaagaccaagaggctgggaaagcctctgtcttgggcagcacttctatttggaagtctctttacagatgcgtaagtgctgtgccttgcttccaggacttctgattgaagagttctcagtcatggctctatatcacaatcacctggggacccttaaagacctaccaagctggctctcattccaggccaattaaatcagagccttggaggacctagacatctgtatttttaacagctctgcagctgactctgatgtgcagccagggttgagaagggccactccaacaaccaggggcatccctgtagaatcagccctgcagacagcctgggttccagtggaagggatggctttccagtccaggtctttgctgttcctcctgcggtctgcacaccagcagcaccatcatcacctgggagcttgttacagatgcagattctctgacttcttactgcaccagtgaagtcaggatctgcatttgaataagaccccagacaatgcctattgaagtgtgagatactctgagagacaggaggttctaacagcagaaggggtaagttagggcagagttagggtggactgagaactacctgggttttaaattgaaaggcctgcatcctgagaaccccatcaatccctggaaaactagaaaggttggtcatcctagactagtagttgtcaataggaggcaatgttatccccaggggacatttggcaatgtctggagaactttttgattgtcacaactggggtggagggtgggttactactggaatctggtggataggggccaaaaatgcagttaaacatcctacaatgcacaggatagtcccacaacaaagtatccagcccataatgtcaatggtgctgaaaccaagaaaccccgcatagggcaggtggattattagaatgtattggcctattttgggcaagcgctaaagagctagctttgttggcttgattcctggggcagagctattccatttagagctgactctttaaagctatgaccttgccttgaccttggcccccaggtcctgccttttggaatgacccgctctcgtattgctgtctttggacctaagcctggaccctgcttcctccatggctccccttgcaattaattgtttagatgagtgaggttctggccctctattggttacagcctcagatgagcacaaatggtcagtttatcgtgtctctagatagaatggatgaagtggcaaggtggaaggcctcgaagaagatgccttttgcctctagctgtttccagtaataacaataataaaatgacttcttctgactatttctagaggactatgtttgaccactggatttcttttggctaatgggatatgatttctttacagaggctcttgctacctttataatctcagtatcaggacccctttcttctctgaggtagaacactccctaaatcatagcactaaagaaaccaggctgtgcttcagagcccaagagaacagtgcttctgaaatagtatgttatgtaagtgctgtgttttgccactgcacaagaaattgttctagataaagtttattaaacgtggcaggagaaggaggaataggttttcgctctatgagcggtagggctgggatgctgccaatatcatttacggtgtctggggaaagccaagggagacacagactggagctgcctcatctcttttccaaaaagcaaagaaaactaaatatagccaagtggaaatgatagcacctttgaaggtacggagaggtttaagttattcagatctcccaagctgattccagcacacacattccctttaatcatcaatctggaaagtatgcctcccattctacttggaaagctttctttgcagcagaggcatctaagaatgcttgatcaaggcctgaagttatgtggctttttgcaatacactgcaatttaatttatatttcaatatacaatttattggtcacagttaataccacctgcctgcagggcaaaggaacaaagagtctccagttcccttcaagttattcaggacaacctggggctggccaagcgaatgggagatgtgttcctatggactcaggcataggtttggtcagctgtccctaggtcgatgactgagagaatgatatcattctactcacccatacaagctcattctttaattggattaaagagggaaggggaaggagattatgagacaggacacttgtgaggtgggaaaagggctggcatttggttctttgtctaaggatctgtgctagactccaggtaatgggagcacaaggaagggacctggcccacttggggccaagtttaccctgaactggctcactgtcactgctattatctgtctactctattatctgctttgcctctcattgctgtgtgggggcttgaacacatcgactcatctctcgagcttcagtttccccaaatgtaaacatgttggaagttaccatttactaagattctaccatgtggcacacatttcacattcatcactcatttggcttcctccataccttccttctctcacaccacatatccagtctctcagccaatcaggcgggctccaccttcagcacatgcccagatcggactggttctcgctgcttccatcactgctatcaacccctttcagtggagtgattgcagaagcatcctaccagtctctaaccttccgccctacttcctctttagtctcttctcaacacagcagccagtggtcttttcaaaacctaagttagattatgccacatttctgctcaaaactctctaaaggctcctcagctcactcaaaataaaaaccaaaggccttataaaggcctacaattctttatatggtctgcacccagcactgcccccttgccacctttgttcctgattctggctccttcctgctcattgaacacatcagacatgctctggccccagggcctttgcacatacagtttcttctggctggaatgctcacttctgaccttcactcaggtctctgttaaatgtcaccccattagagagggttttttttctgaccatctccacaggtactccccgttttccttaacctgctttgtatttttctattacccatataactatactatagattcacttgtttgtttggttcccccatgagatcagaaattcagtaagaataggcattgctgtgtctccagcataaaacagaacctggacttgcaagcactaaataaaggttaggggaatgaatcaagaaccccggggtgtgtgtgctgtttttcccctttgcagatgaggagagacagctcagagtgcttaagtaccttgctcaggaaacacagctggtaggtgacacagtcatcgcttacatccagaattgtctatttgcaaaactctctgaaatcaaatgtggctgcctgttttaaacaatccccatgactgttgtcctcttcagtcctttacactgactattcttttccatgaaaattacctttactaccctaggaataggaaaagtgccaaagcttttagtttccaaagaaaacactatagtgttttttttttttgagatgaagtcttgctctgtcccccaggctggagtgcagtggcacgatcttggctcactgcaacctccacctcctgagttcaggtgattctcctgtcttagcctcccaagtagctgggattacaggcacctgccacaacgcctggctaattttttgtatttttagtagagatgagctttcaccatgttggccaggctggtctcgagctcctgacctcagttgatccacccgcctcagcctcccaaactgctgggattacaggcatgagccaccatgcctggccccactatagtgatttcttaattgttagctccattactgaagctggggagatttgcttccttcaaatttgagtaagttccttggaattaggattttaaaaaatagtttctcatttttctgggaatattttccaaaacctcagtaaggggaccatgatctgtgacagccacaaaatccagagagcttgagagcaattcagacttgtggcttgaccatcccaggggagcgtattagttttgcttgcctttgctttgtcaaaattattatttgtacacttttctcttcagtgccccatgtcaggccaacagaaattggtgccccaaagtatcgaggtcctttgcaacctgctctaactcattctctgcctagagaccagtttcttccaatggacttgtgttgcccatcgtgtggtcaactgttgtgcccaccaaatacgaacatcctaggaaatgtgattttttgagattgtaatccccaaggcaagctgtagcacgtggaccctgatctgcttaaaatattctgagtttttacagtgatgaaaatgcttggaaggatgtgcatgcaaggacgagaaagaggccccacaagagatggcagaggcagaaaacctcttcctaggcccctcctagatgacacagctttgtttccagcctccattcttttcttttttttttttttttgagacggagtatcgctcagtcacccaggctggagggcagtggcacgatctcagctcactgcaacctccgcctcccgggttcgagcaattctcctgcctcagcctcctgagtagctgagactacaggtgcctgccaccacgccgggctaatttttgtatttttagtagagatgggttttcaccatgttagtcaggctggtctcgaactcctaacctcaggtgatccgctaacctcagcctcccaaagtgctgagattacaggagacagcgttttaagaagcggcctatgtcagcgcgtgtatctttttgaatgggaaagcaaagcacactattcattctggacagcccccaaaagactttcctaacttgggcgagaggcaccagcagagggcctgtttctgagatggatcatttagatccatgctccacaaactctcctgtacactccagtctgcttgggatcttgtcaaaacatggattttgattcagagggtgtggggtgggacatgagattctacatttttttcaaactcctggggaatgctgatgcagctggctcatggaccacactttgagtagcaagaagttacatttaattctcacaactcatggggctctaggctttgaaattttcaatgttcacttctgtgcatgagacgtgaggatgaaagtggaggcttttgggccgagtgcggtggctgacgcctataattccagcactttggcaggccgaggtgggtggatcacctgaggtcaggagtttgagatcagcctggccaacatagtgaaatcccgtctctactaaaaatacaaaaatttgcctggcgtggtggcatgtgcctgtaatcccagctactcgggaggctgaggcaggaggattgcttgaacccaggaggcaaaggttgcagtgaaccaagatcatcgcattgcactccagcctgggtgtcagagcgagattccatctcaaaaaataaaaataaaaaaaaagaaagtggaggcttttgcagaatgagtgggttctccctgtgaggctcacacttctgagatcttggagggaactttaactttgatataaagctataacgggcattaacacctagcaagacaggggccagacagcgagtctcacaaagaaccacaccattgttagcttacaggacaagggctccagcgtcacgtcgaacgtctccttcttgaattctgccttcgggaccccggtgtagaaggtgatgttggctgagagataagctgtgatggtgtaacggttgtggctgttgttccggaaggtgatggagagcttgaagtcttttcccagcacagcattttccacttcaaagtccatgtcaacgttggaccttgatttcatgacaccttctgtgttgaggggctttttagctccgtacatcagggcagtttctagggccaatctctcttcttcttgacctgggggagatccagagataatgacaggcaaaaatacaatccaccagagagaaagtcacattaatggatgcaccgtgtactgcacttgttggggtgtttctataatacaagcttcagacctccccaggaggagggtgccgtcattattcctatgttataaattctgcaaagtcagattgccagacagtcagtgaccagcctaggctgcaagttaggaggtgacagtgttgggatctatccagaaaggggtttctccggggccactatttcagggggtgggaggtaaaattggcaatgtctatcttttcttaaactgtggtgtcagtttgcttgcttttcttagtcccagccatgtggctagaatttggggacctctaataattggaaataattgcctcttgccattccacctcctgcaatgtaacttttctctctgatttgtgaatacctgccccccaataagacctgtcttcctcatctctccttccacttgggcctgtcccacttgctgtttgctgagctgacccttgagggctcctgccccgttcttccctatctcactcaattgccattgcccccaacacccatgccatggcagaaggttctaccaaaacttgcatcccccagtccccaaggatgctgggctctggcaagacattaaaaaggcgaccctgcccaaggtgctccggtcagatcccttggagatgccctagttgtccagcgcctcctggagatgttctccaccttaattagcaaattagaggttctaagtgaagcccagcagcaaggacacctctttgcctttctttacacaaggtttcccaaactcatctgacacggagggcagttttttgagggacatctgttgacaggcggtggtgcacctaagttctaatgcagttcgaggtgtgtgtgctgcttttaggaaaatgttttgtgcagggtttgcaaagtggttgtggtggagatgaagggaggaaaaagaggagggtaacctccagaagaagaaaaacatagctttgtctaagtgatgaggcagaaaatacagatacaagtcaggcctcagaaggagcttatgcctcagacactgggaaggtgggagaacggtccttacagagccttggacaaaaggctttggcttggaaacagggctcatgcagatgtgagggatggtcatcatcctcttttccatcctaaatacctttgggtttatctttgtgtatccctaaggatagagatgagaagatgaaggcaaattccttggcttgtaaaaactaggcttgagaatggctagtgaaaaaaaaatcactttaaaataagaatcctagcttttataattatgctagtttaaaggtattgtcttctactttatctagttaataataaaatgcaatggtgactgagaggtcaatgaatcatcagaaccctcactgagggctagctctgtgccaagcactggcataagtgcttatgatgcattgtgtcatttaatcctcataacaacactataagacagacactattattaccatcactttccttgtttgtaaaataagggtgtctacatcctaggtttattaggtgaattagaggaagtagatatataataaatggaagctactctgcaaagacagaaaaaatgccagaaggcattgcatacgaatgtgaatgtgtagtgtgtgtgtgtattaacgatttccctgattgtcaagactgcaagaatgtgccaggaacagttggtctaggacaagcatcagctagagcactcggagggaggtaagaaaaagggaaggaggagtgaggacaagggaagtgcagtgaaatcttttagcagaaatcatctggccaatagatccatgagaagagaacattaatgatgatcactttggatgcgggccagagatgcattgaggcaaaatgcaggagggaaattcgagcatcaggaacacatcagagaggagctgagctggccaaggtgaggtgaatgggagaagaagccttgaagccagccacaagcaacttcacagcctgccatgggtgcaggaacctggagcttccttctggggaagcactgtcctctgtgagcggagaccgccaaacagaagcaggctggggctgttccaggaagcgcaggcccagagaggagaaaacaactgcacggctttcccagagcctggcagagtaattcctgtttctctacagttatgctgcgtgctctggcatcttacataattcagggccacaggcaacattttagtgcagtgagagacatatccaaagccagattatattttctgagattcttctgcagcctctgggtgcaaagtcaaaaatatctttccattaactaggatgtaataagagagcccttttatgttggacgaagcctctcattcttctggctttagctccactgtcacctcccctgtcctccccctcttaccttgtgtaatgtgtcctcaaaccctagtgttctcggctctccctaacacatacctggttttatttcctcttccttgtcacagtactagttactgtgtgacattatcttccttgctggaatgcaagctccatgagaacagagacatgttgtccacctctgcatccccaggccctgaaacccagcctggcacagaggatctgaaggattgaggtttggagaagcattttgctttcagccagagacaaaactttcctcttcataatagtccagtttaggacattttatgttcaactaagcctagctgtgaaagtgcctccccagtaaccattcattcaaatcatctcatgctgttggaaaccccataatgttccaaacaccgtgctaggcactaggcacagaggagaaacagtctttccctcactggtgcagaaggaacacgtgaagagcaatggcagcacacaggtgctcaccacagatgctgggacggaggttggcctgcagtgcatggggaaaggaaggggcatgggaggcctctcggagtttttggagcgagggcaagaccagggatgcaggtggggggcttggcttgttggaggaactgctggcaggtccctggcctctgcatacaatacctgtgggggcatgctcaggaggtgcagtgaccaggtgccgaaaagccacttagcaagaggctttgtgagttaggactggatgccctggaggccacagggagaggggggggggggtggggcttttaagcagtgctgggagaggctcaggtttacatttcagatattactttggcagcaaggcaggggctagactgagggaaggagggcctgaggaggtgaggtggaattgggaagctagagcaagtatttttccaggagaaaactaatcatagcccaaactaatagcagtagtatggcaggaataacagaattactagtaataggggaaacttttattggacacttattatgtgtcaggcactatattaagagttgtacacaccagataatatttaatttttaggctacagagctggaggggaggggatgcattcgagaacaatttcagaggggacatttagaggatttgttgcttaactcattcttaagtagctaaatttgagtggatggtggttctcttcaccagagtagggggagtgggagaaacggacctgaggtgagggagagagtgagaggtgtcatttgggaagttccgtgtcaggtttctgtaggacatttaggtaaagtcccggtggagacacagacatggggtgatggtacatatgtgaacattaacaccagctatgtgggaagaacatcaggtgggtgggaatggagcccaaggatagatgcctagaatgaaatggaatttgaaaagggtgaagaaaggggaaaagcttatagtcaaaaagaggtaggaaaagagggtcaggcaggagggggtggaaccaggagaaagtaacattgtagaaacaaagaaaagacagaattgcaagcaaagggagtgaacaacagcaccaggaagtataggaaggtcaagtaagctgaagtctgcaaaatgtttcttccctgtgacaattgggtggtcttggcaaccttgagaacaacttcaaggaagtgctggtagcagaaatcaggacagagtgtgcgcggaaggagtggagaaggaacacagcaggacgcaagtccaggcagcgctccaggacggcaaggaggcgaggaggaagagacagtggtgaaaaagatttttgtaatttttgtttttaacacagcagatatttgagcctgcttaaatgctgattggaaggagaaaatagagagggagaggtggaaataacagtgaccctggaagtaactgaaggagcaaagagggaatggaatcaagacactgttatcaaagaagatatattgccacaggagaagtcttcagaaattctgattttcaaagtcttatcgtttcttaattatatatcttgaaaaaagttataaagttaataataagctttagtaagttgaagtgaacctgatctttccatgatttaattcattaaaatagttaagtcctaaatctagtaataatttgtttcctgtgattctactcatttccatattttggtatctacactcagcatttgtggatcagagaaattataagagattcaacggtgagaatcagggtggtaagtactgagccacggatatgacgagtcctcactgcatgccagtggccaatggcggccatcaatccttctacccgccacattcagatgcagtcttggtgttcttctcaaaacaacattctacttggtcacttccaaagttccagtttgaaatgtgtatgccacccttgattaagaaactatccacttggggtcaaactccagccccgaagcaggatgagtcgtcgcttacaaccatctatgtggatttagggattcttctagttggaccagacctccacactgtccctctccctcagccttgcctccttgctaaactctagaggcctggacctcagatgtcttcctcatgcagtgcggacacattttgttttaatttgttatccacccccagccaagcccctgactcctgtttcgtggactgggttttagtctttcctctcgtggcatctgattctgtcccattcctgagttggccttcactgtcacctccatgctgacagctaatggcagctgtgctcggctccatggtttccaagagacatctgtcatgtggacagctcgcttcctgctgcccctagctgcctgtaggtgcaacttttcttcactactctgtctggtcaggacttcttccaaatacgagagttctcaccacagtccttgccttactgccttttcttggggacctctttccccagcttcatctgccaattcttgtgtgtcctttgggcttagtgagcccatcactaacttcctccacgaggtcttccccaactgccgattcttggctgagagcctttctctgtgcccggcagcacccgtccaccctgtgccagagcaattctcacccagcacagtgagggctgccttctgcttttctccccagctgcatgggaaggcagggctgtacatgtatccagctctacacagcactggaagatggcagatggtaagagccagctgtcgtgtggatgtatgtatgaatgagtggatgttgcagctaacttttctatgaacttgcttttttgtttctccaaacctttttttgcttataactctacagtaagagggcattgcttgtttgttttgttttatttgcacttatattgttttaaattttcctttaaggaaaaatccaaatgacaaaaaaataccacctttgtatctgtgttgtgcaatggatgataaccaacagaagaggaaaatgaagcatttaaaaaatacagtgaaaattcactagttcagataacaaaaattctgactttctgagactatgcacaagtgttctcaattcagcaagcttcttctttgtagtgcaaattacttttgtaaataagagcagggagactgtctaaactatttaaaataaattctgcactccttagcacttcatggattccaatgaatatttaggtatatgctaattacttgtcatttttatccatttactaaaaataaatactcctaagaacctctggcagtgaatcatttgcaaaatatgttgcatgttccccatcaggacactcacggtcctccagttctggccactgctggcctcgggcagctttgtcttcagtcactgggcattctgagcctgcaggatccccctaaacataccgggctgctgcacgccctgtaactttggtcatgttcacactgtctggaaacccctgtccagcttctttaaccgaggtccacgacttctcttctcaagtctttttctgaatcagttggactaaatgcccctacttattgtttccaaagacccctctgcacaataatcctgtcactcggaccaggacaggaactgagtcctgctcactgctggaatcgccagcaccaaaccaattgcaggcatagagcggacactaagcattgattgagatagaattaaactcagtagtgccatttgaaacattctatgcaataaaagttaacaaaaacccaccatgacattattttggaattgaaactggccttcgacctaattgtcctgagttagagagattgcattgtcctattaatattgtattatctacgttgtagtcttccatgataatgtaatagaacaatgtatgtggaaataattggtaaagtactaaacaaatgtgaagtagttattttaatttctattattggactaaaattacattagttatacagtgttttctaataggattatttaaaattaaggttcttgtgagcaagaacatattctatattctgttaaattaggtatgactttaaaccaaatcattttacaagccacgtgaatgagaattctgcccaaagcaagctagcaaagaaaactacaatgaaaaattgcatatgtgacgtgtctttcacacgtgaaagtttatacttctgctgttgctaccaaatgctgcaaatgccagtgcattctctggaactcatctctgagtgacaatgaataagtactcaatggacttgggcaaataaatcttcattcagtggtagtaaattaccttcttggaatttgtaagtatcagtaatatccatcatgccatctcctccaatttgtttggtcacaattaatttcccaatgtgggtggcatccacattttccaccacatgagtgccatctttcttagctgtaatgtaaatgaggtcgctgttgacctggaaacaggagaggagagcattagccatcatcacatgtctgctgttgccaaagtctttaactgtccatagagcagtcgtctagagatctctggagctgacatgcccctttcttcaacaacattggattcgtatcatagggccaaacaggttttgaaaatattctaaaggcgaatctagttgatttagtagtactttaaataaagattatttgaggctgagataataaactgtctaagaagcaaccatttttctccctcctctgtccttgtgataagtcctacctctcacaggagagaagacaatgccatgccaccatgcccatcgcttgcttccctggacttcttttgggctaactgtggctatgtgacctactgccaggaggaagaggaagtctgctaggtggcttctgggaaacatttttcccctttgaaaaaggagagaggtacatggatgagtttgtccttccccttctgctttcagctgttttcaggtgttttcaggtgaagggatgcttgaagctgctgtggccatcgtgagacagtgaacagaaacactgctgacaatgagaaggtggcagagtagaaagctgagaggcgtttggggatttgggggccttaatgatgctgttaaatggctaagcccgcatcaggaccacctatttcaggatttcttatatgagaaaatcagtccccatctgtttcagccacattagttctgctacttgaagccaaaagtatttaaattgaacaataatattagatgatctaggaggaattcaggctattttctattggttcagcaactaaaatgtgctatttgtgggactcagaaatagtgtcttggggccatgctgtctgcccccaagctctcccaaggctctgctttactattctactttctagagacaatgactaatgtgtgcctgaaagctgactgtaccagagtcctttattacatattttataatcactttcttgaaggttccagttattatcatggaagcaggtaggaagcatgaattgtactgctaatagtcattgatgtatttactaaatgtttcccaagctcctctccaagcctcagttacccactctttaaatagggtgataataactccttcttcataggacgattggcagaattaacagaaacaaatgcacacacattacttatcatagtgtctggcatagagtaaatgctcagtaaatgttattgataataatattgaatagtattgccagatattgtttaaggattcagaatcctaatgatgaacaaaatagatttggttgctgccattagagagtttatgctttagtaagcatgattctgtgcatcagagtcacctggagaactttaaacaaaaatagacgcctgattaaggaggtgggacctaaatcacgtgaggccctaaatccattatattttacaaaaagtctcacataattctgttagatagtcaggcttgagaagccctgcaatacagtgcgataagtaccatgaaagaataagtacaagatactttgggagcacatggggcagtggagtcaagggttggctagaaagtaacagccaaggtgaaacctagatggcatttgagaggaatactagatttgctgcaagaaacctgggttccgatagtgggtgtgtccttgtagaaagtgcatgttaatctctatgaacttcagttcctgattctataaaataaaaatgattaaatttgttctgccaattttatgggagcattttaggccagagtgagataagatctatgtgaacatgacttgtaaatttcaaaattgagtaaaaatataatagtcatcattaggtaatggggaaacttgaagatatatccctaggttttaaagttgaggttaaagagagcaattttactttctcacagaatgttctgagtgcacatgaagtcggatttctactaagggggagatagccaacatttgttgcatacctacaatgtttcagggacattttataaaggatttagtttgaacctcacaacaacaagcctgtgaggtatatattgtaaccgtattatggatgagggcaccaagactcagaagggggaggcaaagtgtttgtggtttcatggctaggagctgctggagaagcagctcaagccctgggacagcccataacctggcccttggccttcacggcacaccgcctttcccacaccaccctgcgggagcatgagccccagcttgagtggtgagatggttccacacttgcggctcagatttctgagggtgataaacggtggccctgcccctcagcagagcagccagaactcaggggtgctagccacatgttgtgaaaggctgaaatgtgaagtcaggaatcaggacaggagaggacgcagcagatacctgtggaatatttgtcattttggaagctttaaatgagctgtctgagaattcgggaattccctctggaggaagccatgtaagtacaaacagcgaccccctctactttcaaatcgtagcaacaataatgataaataacttcttaataacaatccttataacagcttgtggttttccagggaaacaagcaaaatatgaaagtggctgattcctgcccccccaccttgaatatggcttcagaaattcctgtaggctgaaatctcaggacagaccaacagcactgtcctttgcggagagaggagacgagaaacacctgtatggggtggcttttgtatatgtgtgttggggtgggatgtggagggaaattattctttccaagcgacattagcaagctttctttttggtttcggcctgtagtggaatggttctctattctggttgtactagggaatcatctaggagcttaaaaaagcatggaatgattggccccacccaaaatcaattgacgctctatggtagaacaatagataagttcagagtgtatggcaaggattattggacttaggctgtgtggctctggatgagttactgaatctctctctttttttttttttattatactttaagttctagggtacatgtgcacattgtgcaggttagttacatatgtatacatgtgccatgctggtgcgctgcacccactaactcgtcatctagcattaggtatatctccctatgctatccctcccccctccccccaccccacaacagtccccaaagtgtgatgatattccccttcctgtgtccatgtgatctcattgttcaattcccacctatgagtgagaatatgcggtgtttggtttttggttcttgagatagtttactgagaatgatgatgtgatctcattgttcaattcccacctatgagtgagaatatgcggtgtttggtttttggttcttgagatagtttactgagaatgatgatttccaatttcatccatgtccctacaaaggacatgaactcatcattttttatggctgcgtagtattccatggtgtatatgtgccacattttcttaatccagtctatcattgttggacatttgggttggttccaagtctttgctattgtgaataatgccgcaataaacatatgtgtgcatgtgtctttatagcagcatgatttatagtcctttgggtatatacccagtaatgggatggctggttcaaatggtatttccagttctagatccctgaggaatcaccacactgacttccacaatggttgaactagtttacagtctcatcaacagtgtaaaagtgttcctatttctccacatcctctccagcacctgttgtttcctgactttttaatgattgccattctaactggtgtgagatggtatctcattgtggttttgatttgcatttctctgatggccagtgatggtgagcattttttcatgtgttttttggctgcataaatgtcttcttttgagaagtgtctgttcatgtccttcacccactttttgatggggttgtttgtttttttcttgtaaatttgtttgagttcattgtagattctggatattagccctttgtcagatgagtaggttgcaaaaattttctcccattctgtaggttgcctgttcactctgatggtagtttcttttgctgtgcagaagctcttgagtttcattagatcccatttgtcaattttggcttttgttgccattgcttttggtgttttagacatgaagtccttgcccatgcctatgtcctgaatggtaatgcctaggttttcttctagggtttttatggtataaggtctaacgtttaagtctttaatccatcttgaattgatttttgtataaggtgtaaggaagggatccagtttcagctttccacctatggctagccagttttcccagcaccatttattaaatagggaatcctttccccattgcttgtttttgtcaggtttgtcaaagatcagatagttgtagatatgcggcattatttctgaggactctgttctgttccattgatctatatctctattttggtaccagtaccatgctgttttggtgaccgtagccttgtagtatagtttgaagtcaggtagtgtgatgcctccagctttgttcttttggcttaggattgacttggtgatgcaggctctttttttgcttccatatgaactttaaagtagttttttccaattctgtgaagaaagtcactggtagcttgatggggatggcattgaatctgtaaattaccttgggcagtatggccattttcacgatattgattcttcctacccatgagcatggaatattcttccatttgtttgtatcctcttttatttccttgagcagtggtttgtagttctccttgaagaggtccttcacatcccttgtaagttggattcctaggtattttattctctttgaagcaattgtgaatgggagttcactcatgatttggctctctgtttgtctgttgttggtgtataagaatgcttgtgatttttgtacattgattttgtatcctgagactttgctgaagttgcttatcagcttaaggagcttttgggctgagacaatggggttttctagatatacaatcatgtcatctgcaaacagggacaatttcacttcctcttttcctaattgaataccctttatttccttctgcctaattgccctggccagaatttccaacactatgttgaataggagtggtgagagagggcatccctgtcttgtgccagttttcaaagggaatgcttccagtttttgcccattcagtatgatattggctgtgggtttgtcatagatagctcttattattttgaaatacgtcccatcaatacctaatttattgagagtttttagcatgaagggttgttgaattttgtcaaaggctttttctgcatctattgagataatcatgtggtttttgtctttggctctgtttatatgctggattacatttattgatttgcgtatattgaaccagccttgcatcccagggatgaagcccacttgatcatggtgaataagctttttgatgtgctgctggatttggtttgccagtattttattgaggatttttgcatcaatgttcatcaaggatattggtctaaaattctcttttttttgttgtgtctctgcctggctttggtatcagaatgatgctggcctcataaaatgagttagggaggattccctctttttctattgattggaatagtttcagaaggaatggtaccagttcctccttgtacctctggtagaattcggctgtgaatccatctggtcctggactctttttggttggtaagctattgattattgccacaatttcagatcctgttattggtctattcagagattcaacttcttcctggtttagtcttgggagagtgtatgtgtcgaggaatttatccatttcttctatattttctagtttatttgcatagaggtgtttgtagtactctctgatggtactttgtatttctgtgggatcggtggtgatatcccctttatcattttttattgtgtctatttgattcttctctctttttttctttattggtcttgcttgcggtctatcagttttgttgattctttcaaaaaaccagctcctggattcactaattttttgaagggttttttgtgtctgtattccttcagttctgctctgattttagttatttcttgccttctgctagcttttgaatgtgtttgctcttgcttttctagttcttttaattgtgatgttagggtgtcaattttggatctttcctgctttctcttgtgggcatttagtgctataaatttccctctacacactgctttgaatgtgtcccagagattctggtatgttgtgtctttgttctcgttggtttcaaagaacatctttatttctgccttcatttcgttatgtacccagtagtcattcaggagcaggttgttcagtttccacgtagttgagcggttttgagtgagattcttaatcctgagttctagtttgattgcactgtggtctgagagatagtttgttataatttgtgttcttttacatttgctgaggagagctttacttccaagtatgtggtcaattttggaataggtgtggtgtggtgctgaaaaaaatgtatattctgttgatttggggtggagagttctgtagatgtctattaggtccgcttggtgcagagctgagttcaattcctgggtatccttgttgactttctgtctcgttgatctgtctaatgttgacagtggggtgttaaagtctcccattattaatgtgtgggaatctaagtctctttgtaggtctctaagaacttgctttatgaatctgggtgctcctgtattgggtgcatatatatttaggatagttagctcttcttgttgaattgatccctttaccattatgtaatggccttctttgtctcttttgatctttgttggtttaaagtctgttttatcagagactaggattgcaacccctgcctttttttgttttccatttgcttggtagatcttcctccatccttttattttgagcctatgtgtgtctctgcatgtgagatgggtttcctgaatacagcacactgaagggtcttgactctttatccaatttgccagtctgtgtcttttaattggagcatttagtccatttacctttaaagttaatattgtcatgtgtgaatttgatcctgtcattatgatgttagctggttattttgctcgttagttgatgcagtttcttcctagtctcgatggtctttacattttggcatgattttgcagcggctggtaccggttgttcctttccatgtttagcgcttccttcaggagctcttttagggcaggcctggtggtgacaaaatctctcagcatttgcttgtctgtaaagtattttatttctccttcacttatgaagcttagtttggctgaatatgaaattctgggttgaaaattcttttctttaagaatgttgaatattggcccccactctcttctggcttgtagagtttctgccgagagatccgctgttagtctgatgggcttccctttcagggtaacccgacctttctctctggctgcccttaacattttttccttcatttcaactttggtgaatctgacaattatgtgtcttggagttgctcttctcgaggagtatctttgtggcgttctctgtatttcctgaatctgaatgttggcctgccttgctagattggggaagttctcctggataatatcctgcagagtgttttccaacttggttccattctccccatcactttcaggtacaccagtgagacgtagatttggtcttttcacatagtcccatatttcttggaggcttttctggtttctttttattcttttttctctaaacttcccatcttgcttcatttctttcatttcattttccatcgctgataccctttcttccagttgatcgcatcggctcctgaggcttctgcattcttcacgtaggtcttgagccttgcttttcagctccatcagctcctttaagcacttctctgtattggttattctagttatacattcttctaaatttttttcaaagttttcaacttctttgcctttggtttgaatgtcctcccgtagctcagagtaatttgatcgtctgaagccttcttctctcagctcgtcaaagtcgttctccgtccagctttgttcctttgctggtgaggaactgcgttcctttggaggaggagaggcgctcttctttctagagtttccagtttttctgctctgttttttccccatccttgtggttttatctacttttggtctttgatgatggtgatgtacagatgggtttttggtgtggatgtcctttctgtttgttagttttccttctaacagacaggaccctcagctgcaggtctgttggaataccctgctgtgtaaggtgtcagtgttcccctgctggggggtgcctcccagttaggctgctcgggggtcaggggtcagggacccacttgaggaggcagtctgccccttctcagatctccagctgcatgctgggagaaccagtgctctcttcaaagctgtcagacagggacatttaagtctgcagaggttactgctgtctttttgtttgtctgtgccctgcccccagaggtggagcctacagaggcaggcaggcctccttgagctgtggtgggctccacccagttcgagcttcctggctgctttgtttacctaagcaagcctgggcaatggtgggcgcccctcccccagcctcgctgccgccttgcagtttgatctcagactgctgtgctagcaatcagcgagactccgtgggcgtaggaccctccgagccaggtgcgggatataatctcgtggtgcgccgttttttaagcccgtcggaaaagcgcagtatttgggtgtgagtgacccgattttccaggtgccatccgtcacccctttctttgactaggaaagggaactccctgaccccttgtgcttcccgagtgaggcaatgcctcaccctgctttggctcgcgcacggtgcgtgcacccactgacctgtgcccactgtctggcactccctagtgagatgaacccggtacctcagatggaaatgcagaaatcaccagtcttctgcgtcactcatgctgggagctgtagactggagctgttcctattcagccatcttggctcctccctccgagttactgaatctctctgagcctaccttccttgtcgggctggtggatagattggtactacttgtgaaagccctacatttacggctaatttttcttccttcttttgaatgtaatgttagtgatcccctttttctatccctacacttgaagggttatcatcacacaaaatctgggcattggtgcatgaaattggatatttttttcacaacaccacacccttgcctcttaagtacaggcacttcctacatagtagcctctaccattggtcagggccctagcttctcagtaaaggtggggtggaaagcaggcttgggggctgctctctgcaaatgtccacctgggcccatagaatgtgaacatttgtccacaggtggcagaagatatgctcttcaccactgaggctagagacgtgctcttgctttcaggaccctggacagagtttgctttggtttgtttatttgtttccaagtggagataaccttgtctgcaggctctgcagagaaaatgctgcttctcagagggcatatggaggcagtgaatgccttcctggcactggaccctagatcctgctctcagcaatgcggttacaagagcttctaccttcatggagctcatattctagaagggagaaatggagtacacactaaggttggaggatgaaaacaacagggcagatggtgatattttaggtgcagttgggtgagcgaaggcctctttgaagaggtgaccagagcagagacttgaatgcagagagggaacaaagcatgcaaagcattcttcctacacagagtgaaagatagtgaggggagctttcctagcaaaaggagcagtatgtctaaaagtgctgacacaagaggatgtgtggatgctttctgaagagaaaaatctcagtatggctggagggaaataaacaagggatgaagtggaagggaagccatggaatcttgtaggaatttatgttcagttttattgtaagggtggtggaactccaccagaagggttggggcaggagtgtgatgtttgtatttacatttaaagaataattctcttgctctgtggggaatagacagaaaaggagcaagagggggatcagggagatgagttaggaggagttaggaggtaactttatggagctcagtgttgtacagagctcagagggtaacgatagagattgtagaagtggctggatttatgataattttgggaaggtatttttggcaagatgcataagggaggttaagaaggaaagctaaaataattccaaagttttgtatgctatttgaataaatgactggattattttatagccaagtaggagatgccaaaaaaataggctgcatctgataagatagtagcaaaataaataagtttgaattgagaatgaataatctacaggaaaacatctccacacgttgtataagagaactgctggcccacagcagaggagggcttagcttcttgagtgatgagatggttgctgtggtcccagggagccagttattgctcctgtcaaaatcatctcagcgccagtgagggcaggcaggagtgtgtgcatgcatgtgtgtgtgtatgtgagtgagtttggggtggagtggtgtgaaagagggcagcagagttaatgagaagttaggacagaagagagttatctttggcaagaaggagagagttcttcactaagaacccctgagggcttcgtgaacatggaatcttggaatacgactccagacgcttagaacagctctcatctcctctcacctatttggaagccctaggccaccataagctggggagataggcagatggggcttcagatccacaggaacccactgcagcagggaggacatgggaagggaggggtaagagaaataagcttcaagccctggcagaaacccagaaatgtggagggtgaacttccaaagtggaggaggagagaaaaaaggaacagaaggtaagacattttccaggcatacccctcttctttttaggctctgctttcactcatggagactaaggccctgggaacactaaaaaacagtcaatgaacatgatgcttgatcaagcctggaaatgagtaaggaatgaccaagaaagtcagcatgctgggagggaagagaaggcgagctgatgcagcaaggacgagggagagcagagagagccacagactcgaacctgagtcatatcgactcatatgacactccccatggggtcccactgcaggcacccttgagaaaagattcctcatacacttttcatcaactcaaacatctcttaaaaatggctcagcccctggagcgcagcccatgccaaagcaacaaattgtaccctctgtcagacacgcctctgcagtgggtgagaaaggagtaattataatctgcaaatcctgatgacattcataacaccccgatctatatttaataatagcaaaaagtgtttgcatttacagctattaggcagcttgcttgtggagggaggtcctccttctccttctttgcagcaataaagtgtaataaaaagctgaaaacaaggctttgtggatttcagagtgatctcctcattaggggctctcgtagcatcataaactatcaaatgacagctgggaggtttgtggaaatcttcaaatcccaaagtgaaaacgaggggataaaattccaagtccagtaagcttggtctccaaaggcttctgtaaactgccacggcaggtacgatgagatgaacactggtcttttgtgtgtttcaaattcctgatcttgctgtctgaattttgatgttcgttttgctttctaaatattaacatttctcagtcctgcctcctcttttcctcattattgccatttgtctagctcatgccctttccatctctggcttggagggatgaccagccctctagatgttccccacaacttcataacaacccctccaatccgtgttccacaaggctgtcagcaccttgcccaagttcccacccagtgaaaactctccctcacttacaggagggacaaggagcaagtctctcagggaggtcctctgcactgcgttccttcagcctccaccttccaacacccctgatgcatccttggcgttctagtgagtctgcacagctttcaactgcccccacaaagctttcagatgctcaactcatccccctgctttgcactcctcccttcctctggcttctttctaatcattttgcctaatcatccctccttcccatgtggtcccacagttctctgctcttactacctggggacacttccacaggcatcctcactgtctgttcccaggtcgcccttccttcctagatggtgtcttgtggtctttgccatcctgcttcagttcttggcctctacttcccaactcatgcatcatatgaatgcagatctgtgctctctacatggcccacctgacaagtattgttgttatttcatgttcagtgtgtttgtgccctgtcacctggcatctagaaatacgtttcttaaagacttgaaccttagaattccccccagtacaatgcctggtgtacattaataataactatttgttcctcctggagtactagagtgcaatggttaccagtatgcattcaggtatctgcctggcttcaaatcttagcactgctatttattagctagatggttgtgagaaagtcacttaatcactctttgcctcgattttattttctgtaaaatgggaagaattatcaattttagaaggttgctaagagcatccaatggtaggcaaagtgaaagacattatttcagtgtatttactggtgcaaatataccctggggaagtcctgcctctcagtctttcaagtcttcctaggccggcagcccagccttctcgtttacccaacatctcttacatttaatttgattttcagagctctccttgagtatcctttaacagcctgttctgcttccagtccctgcctagttcttctgaaatggcagagcctttgcccaggcattcccatcaaccctgtaggtgggctgtattcctctcttagagtagcctccaggctccccttcctcctttggcaactcaaccctccctccctggccacaggtgatggtgtgggatggcaggacatagattgcaaaggccagggtaagaccatggttgggtgtgtgtatgtggattttgtcttacctggattgctggactagtcccagagggaagtggcatgtcctgaaatttcaattcatgacccatctcttccaatgaggttagttgagagatccattagtcatataatttctctggagcagttgatacttaatgggtgcagagaactaagctaatgttagtaaagcatttacttttgggagtagggaatcccaaaacatcaaggaaagaaaaatgttaaacaagaactgcatttagcattaatagcctggaagttggaataatgcctagttacctttgtcaacacgaagcatacgctatgtacctggaaaacttagaaacaacaacttttagcttactctttcatgtgttaagaggttggggagaaaaacagcactttcctccagcttcctgcttacctctgcaaaaacaaaaggtgcatcaaattggaagcagacatggccgtgcttgatggcttgaaccgaggcggggccacaccgatacatgcctgcattgcacagaggaagggcggtgtgagtttgtcatctccaattctgtccagatactgcaagattcatggcactgagggtgactctgtaaagaccagtgttcccaacttcattgctgatttagcccagatgctttccaaggctgaagagaattccattggctatgccccctcaagccaaaaattgaagccatggaaataaatacaaggcaacactattcctgcatctactctgccacctacagacacatacccagatgtgttgatgccaagcaggtggcttacacagcatttatctcttgttcaggtggtatctgaaatgttggaaatgttgatgtgtgctctgtggttgtgctgctgttgctgtttgttttgctttttgtcttttgtttttggacattatgaacatatgtcaagtttaactggagaatttggacattgcctgtgcattttggccatgcccaccatgcatttaggaagtcagaaggcctatgttactcttctaaaatgctttaaattttaaccacctatctatatagttaataagagattagctgctattagtcacctgtaaaatgtccccatgatatatataccagaacaccagaaagtgctaaactttcttccttaaagcctaggattataatatggtttcagtatgaatatccattgaatgtttatgcatgttcctgtgtgtgcccatcgatatatcaacacctgaggaaataaacataatatccacagtctactgattctttatattatcatattaaagagagatggaggcttatgatgtgattttataaaaatctgggggaggtcagagctgcagctgcttagcatagttggcaagttagaagacaaatacccacatactgaagctttggaggaaatcacatgacataaaaggaggccaggttctggaaaaacaatttaaaggatgatctataattatttttcgagttctctattttctctcctgccttatatcttaccagtgcataccacaaagggctgaagtatattttatagcctagtaaaaatgcttacagatattttctctcctgtcttcaaaactgcttagcaaagcaagaatggatgaattatacgttgttttatattctttctctaaaatctgtaaaataatcagggtaaagctgacaatggaaatgaaattaaacctgattggaaggtagctaatactgtacatgtgcccaggaagcacacttcagatgttgcctcccaatgggcgtggttcccacacatcaaatgcaagcataaaagcaaaacaaagatcagcaatgaagcaagttcccagagggaggacacagttttaccatcgctattttcctggggggtgctgtccacagcttgccagcctccaaatccaacaggaaggtcaggccttgtcatccatgcttcattccagcagtggtagttccttagaaaacacaagcccagaaaggttaaacttcccatcacacccaatgctccaagagatcaagaagtgacggccaggcacagtggctcatgcctgtaatcccagcaatttgggaggccaaggcaggtgagtcacaaggtcaagacatcaagaccagccttgccaacatgatgaaaccctgtctctactaaaaatacaaaaattagctgggtgtggtggcgggtgcctgtagttccagctacttgggaggctgaggcaggagaatcgcttgaatctgggatatggaggttacagtgagctgagattgtgccactgcacttcagcctggtgacagagggagactccatctcaaaaaaaaaaaaaagtgaccccaaatcctgtgcatatgctatctacagattattagaatggattaagccaaatctgagggctcctggagatatcctggggctctagacttgggttttctgggcagattcattctcattggcatccctcaggacactcacatggctggatgtctctttccctctgctaagagcagcttcaaggccacccaaagatatttgaatcagtgcattgaacagttttaatcttaaccattttctgctgactaacgaaacagaacttactaggtaccgacagggtggggaagaaaagttaaccaaaactgaaatatttattttgaactttttaatatagttcctatttagaaaaagcatattcctttgtagcaattaagcaaaaaatacttgtgtttgtggtcttagactattactgtagaaactacaacaattatgcctgactataattctctacaatttccatctcgtgtccaacaagaagaatacgttgtcagggtgaatctctctttaccctttattaaaagtgctaagggtcatggaaaacttctcagaaatttgaatatgaccctggaagcaagagcatggaataaaatgccatcatgaattgtattattatgtccttgaaaagacctgaaattatatgacagtacagaatcaaatgagagcacattaacccctcagcactatagaaaatgttcatatagtaataaagaaagatttaataatgtggtgaggtagttacagcagtctttgtttatgacactgatgaatttcaggttcaactaccacgggttccgtgcctagacgcccttcaatgtcagctgtttgcccatgctcccatctttctctgagtgcagcccatttttgattggttcaagagatattaatttcactatgtacccactacacaccaggcaccttggtaggtgctggagactcagagatgatcaaaacatagattcttacccataaagggtaatcttctaggagaaatgacaaacctgtaaaccaattatcaaaactgtcataggtttgctgtgagacttaaataagctaatacatgtatttcgaacacagactggcatgtgttaagtgctcaaaaatggtaactctcaggctttgaaaaataattaatttaaatgatccctggtaaaacgggtgttgatttggggtgccatggagtctcagtggagcaaagtctccaggtatttgggaagtgatgtttgagctgaggctcgaaagataaatgggaatttaggaggtcaagaaaaggaggaagaacaaagttacagcggcatgaaatagccatcatggtttgtttgtggaactgtctgctgtgtgttgtggctggagcatagcgtgtttgaacattcaggttcataggagaacggtgatggcaggcaatgcacgaaactaacaaatacatataacacttccttagtgcgaagtggtgttctaaaaccctcatggatgttaacacatctgatgtccctagcaccctataagaacagtactattggtcgggcgcagtggctcacgcctgtaatcccagcactttgggaggccgaggcgggcagatcacgaggtcaggagatcgagaccatcctggttaacacggtgaaaccccgtctctactaaaaatacaaaaaaattagctgggcgtggtggcgggcacctgtagtcccagctactcgggaggctgaggcaggagaatggcgtgaacccgggaggcggagcttgcagtagtgagctgagatcaccccaccgcactccagcctggtcgacagagcgagactccatctcagaaaaaaaaaaaaagaacagtactattataattacccccagtttacaggggaggaagctgaaacccaggaaggttaagaaccttgctgaggtcacagctagttagtgatagagctctgaaatccacactcttcaacactgacctatgatataggtaaggataagattgtgaaatcctttgatatcaaattaaacattcatgctttattcttaggctataaaaagccattggaataatttaagaagaagatctaaatttgcaaatctctgttcgtggaagatggatggagaggcaaggctggagattgagctgagtcctccccggctgtcccccacccctgaagaactgcaatagtggaccagaaaggcattcaggtggccagcaccatggagagggagagaagccattggggatacaacccacaggtttagggagatgtgagggactcggatgagttggggaagacttttgcctgtccaagtagtatgatggttttgtttaccaagactgtgaataaaaaaggaagagaagaaagtctgtgttgggactggtggtgatgggtggatgaccagcccaattctgggcaggatgagcttgagtgcctgtgggaaacccaggaggtgaggcctaagaggcatttttgtctacacttgtgatgctctggattggatgaagcggaggaggaggttgcgggagtattggtgggtggtggaggagggctgggcaaagccagctgacaaatgaatgaggagggaagaaagaggtagcttcttccttaagagtgacttagaggctggctacagtggctcacaccagtaatcccagcattttaggaggccgaggcaggagaactgcttgagcccaggagtttgaggccatcctgggcaacatggcgaaaccctgtctctattaaagttaaagaagttagctgacctgtagtctcagctacttgaggggctgagtgggaggatcacttgagcccgggagatcaaggctgcagtgagccatgattgcaccactgcactccatcctggaagacagagtgagaccctgtctaaaaaaaaaaaaaaaaaagtgatctaggttgtaagacagaagaaaagatagggcaggggctagcatgtaatgcaatgcagggaagtctgtttcggttattttcaaattaaaagagactgaggcatgttcatggaggaatggaggaaggtagagacagtgggaatataaaagggagctgaaataccaaggttgcaagaggatgaggctgagagcaacaccctggacagatgtgggaagcaaggcagggtctgcagggagagaagggtacagatgtggattagggtgaaggtgtggaggtctctgagcaggaacatgaggtcagttcccacctgagagcctccatctttgcttggaagctggaagggaggtcactgtgtatgttagacaatgactctgctagcctctctccagagcagtgaaggttgccccatcaggcagaaggacccagggaaaaacagcaataaaacatttgcaaccctgaatggacgccgtcctgcttcctatacgacccgaagtgtttagtgaccccctggctttcactgctacaccatcaccctagattaataggctccagaatagccttatttaaattcaaatatccttggcaaggttagcctggaacaagataaatatgctttgcacttcagatctcaagtaaagacttttctttgaggataatatttcttttcaaatgaccaggacccggggaaaagtttcttttctctcactctgacatctaattagttacacatgatctcttctagtttcactcatggctgagacgttatctgtgtatttagggtgggagtttcataacagggtcaggaacttgcaggcagtgggtgaggtggggaggaagcaaatgctcccagtagggctgggcctccatcaatgggtggaaagctaatggctcagctcccagacagcccatgaagagaacgagagggtgctacctccacagccatggggatctctttcaccatgcaatcctctctactcaggaatgactaggggaattgtgtcctaagccacccgtgcctcaagagtttccatttggctgacattacacaattctatttaagcatgctcagttttttatatcccaagttcctccatgaaagaggctaatgtttacagacatttattttcctgttttttgttttgttttgttttgttttcttgagacagggtctcatgttgcccaggctggtattgaactcctggcctcaagccatcctcctgccccagtcttttaaagtgctgggattacaggcgtgagcatttttctcagatatttagcatttttgctgcaattcatacgtgtcagaggatctaattttcaatatacagtagtgtcatttccctttgtgttggaaaacttcctttagcatatctttaattttttaaatagacacataataattgtataattgtatatattatagggtacaaagtgatgattttacatatatatataaaatcaaatcacattgcaggataattaagttaataacatatcgattacctcccatatttatttttgtggtgcaaacatttgaaatttactctcctggcaattttgaaatatatagtatagtataattaactatagccaacatgttgtatatttgatctcaaacacttattccttccgtacagacttttcctaatttcatctactgattctccaggttggaaaataccaactgattcctgaaatgctactttttattctaaagcttctttatctagatccataagagtttttctgttttcatcttgcaattccatcatgcatttgtagagtgcataaatctactttgggagctctgttggtcttattcttctacacatctccagcactagagcagggcccagtcattaggaggtgctcagtaagtgttggctaaataaatcatgaggacatctagcaaggaagttcttattaaacctttgcttgtttgtttctctttaagattcatggttttttatgttctcggagccttcatttgaaacttaagttctcactatacagtcaaaaggtaccgtgtccctttaaagtaaaaaaattctaaatctccttgttgcctctttctatagaagcagtatagaaatcaaaataaaggcctcatttcattgagacttgtttaatcaagatgagaacaacctttgggaggataacgatggagatgacaagtgaagaacacatctctgctttatgtttcttcctgtgtgttccgtgcagtgacagctagtaatttttagaactcctttcaaggatgctaataattcagcagtattggtacaaaggactcagagaaccttcaccaaaggcagtacttcactagaacagcagcaccatcccctgctgggggaccctacatgggacgtcatagtttatgttgtgattcagtaaatccatgtgctttgaatttgtacacgggaaataatcatacaaatgcaaagacaagtgtgttatgtaagaatgttcatcatggtgtaagaaagggaaagtggaagcatggaagcagcctaactgtccaacatgtgatcaagtattttgaaacagaatagaatgctattcagccataaaaatgcagatctatattgactaggcaagaaagacatccatggcatattagtgtttcaaaatcacatgcagagcagaattttaaatgactcccactaccttttgcataattttgtataattttctcccctgagtgtaggtgaaatctataaacagaacaggctagtactcctgtgactatgttgctttatgtgtcaaggaggattttgcagaagtaattaagtttactaatctgttgactttgagttaattaaaaggtagattatcaggtgggtctggcctcatcagatgagccttttaagtctgggtctagagatcagagacagagcaagtcagggattcaaagcagcagagacattctcctgctggcttcaaagaagatagaagcatctatgagttctacagctgcaaggaactgaattctttcaagaacctcaatgaatttggaagaggactctgagcattagatgggacaacagtcccagccaacactgatcgattgcagttatctgagaccctgagcagagagacccagtcaaccagtgaccaaactcctgacccacaggaattgtctgatgataagttgtgtttttttaagctgttacgttgtggtactttggtactttggtatgcagcattaaaaacatgcatacgacacacaaagagacatattacagaagggttaaggaaatgttacagatgttctgagtagttagaaaatagatacttcttactttggtattttttctgcaacatttaaaatactgcataataaacatgtattaggttccctccgaaacactgaggactatttatttatttatgtatttattttaccaaaacccagtagagcacagtagttcaaaatctgtcttggttctggctaaggtcatatccagaggtataggagcctatggggtggtgaagagctggacagagaacacagctgagaccaacatgggcttcagggtgctatgtgtttgaagaaaataaagtggttaatttaaacaaggagtcctttactgaccttaacttggctaactaactgcttaaacagtccacagggtcatctcatttacaatctatctgtccagaaatgtttcagagaaaaggagttcttaaaagggaagaaagagatatgggcttgtaattttgtttgtgcagctttattagggctcaggggagagcacaaataagatcaagagaaagccctggaggagatgtcttggaccaacttcaactgtaaaccaagggtttgaattctttcatagcaaaactggcagggggtgaaagaaaggcactgtctatcttgcaaatcatttgtgtatttgtagcagatgggtgtagccctacctctctggttctgctaatacattccgaatacagacaacaatattgttgacaataatgacaggacatcctggattattaagctctggccatttcaggggcagtggggataggatggggtgggagttgttggaaagaagtgggaacaatttggtggactctgaggcttgtctaacaagacatttcaaagtggaaatgaaagcctggacttagaaaaaaacttgttaggaaatataatgaaggaagatgacagaaaggaattattcagaggaaagaggcatgctgcaggaatctttgatggagctgcgagcatgacactatttcagaatacagctattcattgtttgagcctgttggagtgctgaaaccagcaaggggcatttggatgttaactggcgtcatgtcaaaggccagcagtccagtcaggtggagactaggccagggcccctgtcctctctgaggctcagctgcttcagatccctctggctgggagccacctggggaagccctgggtagccagtcatgaatggcctcatttgcatagcaatgctatatgggagataaatggagggcgccatgggcatcccagctcagtaaaggatgctgttgtaggaatcaactgaccgccaagaaaaaagaagaaatgaatgtgtttattcttacttgtcctgtgaaggcaaggggttttgcaagtctcactgagaagtcacgtgtaaatacagtctgatatagcacaagagacctcaatggagggggttgcagatggcggggtgcacttggacaggtgctgtagcttccaccattaaactatgaggtgtatgtgtagtaggagtgatagtcaaaaccattaataagtgctcagacacaggcatgaaccaaatggatgttgcaacccatcggaaaggacatcaacgctaaatgcagttctaccagggcatcctggctagataccagtccagatgtcctcactcacatacacactacaggagtactgaacaaatttccatccacaaagtctttagggagtgagtccttccttagtcctgagagtacagcctttccactctcttcttaagcttccaagaacagatttcttggatatttatcaagagaattgtaaagcagctttgttaatagcaatttttagaaaattaggggctgattatccagctttctttttttcttctcctttcatttttccccatggtgtgattacgtgttttattattttttttttagtgtagtacctccaaatggaacaggcagggaatgaaaccaaatttggcaaaaataaaacacaagttataaaacaaaacaaaacgaaaacaacaaaaattaaaattaaaaattttcagaaagtagatgccaccccatcacacagaccacgtttgccatcattagttagcagaaagccctttctgagcacttctgggttccctctgctgggttcattttgaaaatgaagccctacccccttttaccactctggcatagcaagctaggaattaatatcctgactgaacatgaagaaaatattgaattttgagagcatttgtttgtaaaagtctaatgtataaaaaagtttatataataaattctggacaagtgtctccataattattgaaaagggttaaaagaattccaaccaatagacccagtaggtaccaaagttactgttttgcattataaactatttatgaatatgatattctacagctgatggctcttatttttgtaacgtgttcctagaggtattattaattaccaaaaggaattacattacattcagtatagcctaggcggtgcatactttattagtttctaattactttaaaactagtaaccttctaacggtatatatgatgactcttgtaggcaaaaattatgattaaccagaacatgattccattgccatatggagtgttttctatgtggtttattaaatgattcccactttttttccctttctgcctaatttcccaagaagttattacaatgacctctgacattttacccccaaactccccttggtttactctcaagtgagacttgagtggaatgagggcttcaggcgctctttggagacattccagcagcaggaatggatgggtacctgagaggaacgggaggagagtgtagggcagtgatttccaaccttcaaagagcaatgcccccttcttgtttttaagcaaatattttttacattccttcattaggctgaaactaaatccatagatggctttctacatacataattttctaaaagatcaatatcatgccccgtaatgtatgggagaaatggagaaataaaaggatatacatacaataatatgtgtttcagcagatatatgtcaggaagactctactagatgccaaaaatattcttacaaaatgtaaagcaccttagcagtgtggtaggaagcacttgtgtagtggttaagagtgggctctgggaaacacctccagagtggcagagtaaggactactggaaatctgctcctccatagagcaatgagaacacttgcaaatatgatcacagctgacctttccagaactctggaagtgaagcaaacaacaatctgaggggcatttattcaaggaaaaaaacaaacaaacataaatctcagtaagaagagtgactttgtggagttttaatttgccttattctcaccccacctccacagtagtcttaaaaaccagtagcctcagtagctttgcaaacttgcagcctagaaaccaatgaaggagagaaaatgagttttgaacactccgaaagctctttctctccaaattgccactgcttaacttgcctggcagctctctgaaaagctccattctcagggcttgtttttatttgatctgattcacagctcattctgaatcagccctattcatataatgtataaaaataaaatagaagcaaatgtttaacatcataatgcctgaaggggcaataccacttgagactaaaaaagggctatccaaaacactttgaaagaaaaaacagggaataagatgtccataggaggctttgaaaaactctgacatagatagccacaaacatgtgcagggctgtgagcatgcccaaaagaaaagccccaggaaggtcctcatctctcatctctggttgatcttgaggctctgtccacacaggaagtgaaggctaatgaagaattttaaactgcctgcgggttaattaaagactttccccaacacacacacaacgctacttggctaaagctggggagcttttggcccaaggtatttaaggaaatctctgtccaattgttatatgaccactaagctaactcagctcacttcagtggccatacatgacaagaaaaacagacttcatagaattagtccaagaaggtcactaaataaacgagcagcagcagcaaaaacaacaacaacagcaaacatcaacaataggtgctagagaacaggaaatctgattttaagaattgccacattatattattttaaatgttcagttttcaacaaaaattataagacacagaaaggatcagaaaagtatagcccatacacaggaagcagccaagagaaattggtattaagaaagctaagacattggacttacaagacaaagatcttaaattagccattataaatatgttcaaagaactgaagggaaaccatgagaattatatctcatcaaatagagaatacgaatgaaaagatagaaattatgaaaaggaaccaaatagaaattctggaactgaaaagtacaataaccaaaatgaaaaattcactagtttcaacagtagagttaagcaggcagaaagaagaatcaatgaacttgaaggtaggccaattgaaattatccaatttgaataacagaagcaaaaaactaaaacaaaatcaaagccccagaaacaggtgagatgttacttatgcagttgatgaagtatattaacattttcctaatgggagtcccagaagaagaggaaagagagcaagtagcagaaagaatatttgaagaaacgatagccaaaaatttcccaaattcaatgaaagatattattatgtacattgaaaaagttcaaaaactccaagtaggataaacttaagatatctacacttagacacatcatattcaaactgtcaaaagctgaagacaaatagagaatctcttttttactttttttctttttcaaatctcagacctgagtgaaacaaagaatctttaagacaacattaaaaaaataatttaccatgtacaagagataatcaataagatgattttagttttctctcttattcgctctcttatttttctctcttctccatttctatttatacttcatacatacataaaaagttaactcaaaatgaatcccagacctagatgtaagatctatgattgtaaaacacttagaacaaaacagaggagcaaatctttgtgaccttggatcaagttatggtttcttagatatgacaccaaatgtataagcatccaaagaaataattaaaaagttggattttataaaaattaatttctttagtgcttcaaagaacaccattaagaaagtgaaaagagagcccatggatggtagaaaatatttacaaatcacatatatgatagagagcttatatgcagaacatataaagaatagttacaattcaacaatacaaaagtaggtcaattttaaaatgggacaaaaatatgaataaccattttgccaaagaagatatacacagggccaagaaaaacacaaaaagatgttcaacgtcattggtcattagagaaatgaaaattaatcccaccatgaaataccacttcacacccattaggatggctacaataataattaaaaaaaaaaaaaaaacagaaaataaaagttatttgcaagaatatgaagttggaacttttgtgtattgctagtgggaatacagaatggagtagctgctttggaaaacagtttggcacttcatcaaaagaaattaaacatagagttaccatacaacccagaaattccactctaaatatatgcccatgagaaataaaaaacatatgttcacataaaaacttttacctgaatgttcattacaacattattcatgaaagccaaaaatggaaacaacccaaatgtacaactgatgaatggataaataaaacctggtttatccacacaatgaaatatcattcatcaatgaaagggaatgaggtactgatacatgctacaacacggacgaaccttgaacacgttacgctaagtgaaggaagccagacacaaaaggtcacatattacatgactccacttataggaaatgatcagaactggcaaatccatagagagagaaagtagattcgaggttgccagagttggagaaatggggagtgactgctaataggtatggcagaggggagagaaaatgttctggaatctgatgataatgatggttatacaagaccacaaatatactaaaaatggcctagtgccgtggctcatgcctgtaatcccagcactctgggaggctgaggcaggagaatctcttgaggccaggagttcaagagcagcctgggcaacatagtgagatcttgtctctacaaaaaaaaaaaattaaaaattagccaggtgtggtgggtgtgcctgtagtcccagctactagggaagctgagatgggaagattgcttgagcctgggaggtcaaggctgcagtgagtcatgatcttgccattgcaatccagcttgggtgagagacaacctgtctcaaaataataataataatacataaataaaaatatactaaaaattattgaattgtgtactttactttaaaggagtgaattttgtaaattttgtagcatgtgatatatatatatatatatatatatttcttttttttttttagaggcagtcttgctctgtcgcccaggctgaagtgcagtggcacgatctcggctcactgaaagctccacctcccaggttcatgccattctcctgcctcagcctccagagtagctgggactacaggcacctgccacagttagcctgcaatgtgggactacaggcacctgccacagttagcctgcaatgcctggctaatttttctgtatttttagtagagacgggatttttactgtgttagccaggatggtcttgatctcctgaccttgtgatccacctgcctcagcctcctaaattgctgggattacaggtgtgagccacctcgccaggccgtgaagcatattttaataaggatgttaattatttttatttatttatttttgagaccaagtctcactctgtcacccaggctagaggaatacagtggcatgatcttggcttactgcaacctctgtctcccaggttcaagtgattctcctgcctcagcctcccaagtagcggggattacaggcatgcaccaccacgcccagctaatttttttgtatttttagtagagacaggttatcaccgtgttggtcaggctgttctcaaactcctgatctcaagtgatcctcctgcatcggcctcccaaagtgctgggattataggtgtgagccaccacgcccagtcaataaggatgtcattttaaaaagagtgggctctggggtcagcccccttgggtttgtaattcaggttctgccacttattggctgggaccttggttaagttaccgtgccactaacagtaattaccttaacatgctgttaagaggtagaagtaaattaatacatgtcagcacttaaatcagggcattgcaaaaaaaagtatttttgtgaacatgagctactcttattctttgaaggtggcaaataatgttttttccaacactattgtgtgccttcagtgtatattctcagtcctctaatgctaaggctcatggtctaactccaggtgattttcctaaaaccaacttggccagaaatatggttaacaagaaaatgtttgaaaataagcatctctgataactgtccagaattggcaactgcaatgcatcatgggatatttttacaaacccttaagcatctttaagcaatttggtctacattctgaatttttcttctctactattttacttggaattcgtttttagatcattctgctttgcagacagtgattaaaattgaagataattttacaatataaaagtccaactagatgagtcatacacagcatctaaaataatgtatagaagtgacaataattagggggaggagccaagatggccgaataggaacagctccagtctacagctcccagcgtgagtgacacagaagacgggtgatttctgcatttccatctgaggtaccgggttcatctcactagggagtgccagacagtgggcgcaggttagtgggtgcgcgcaccatgcgcgagccaaagcagggtgaggcattgcctcactcgggaagcgcaaggggtcagggagttcccttcccgagtcaaagaaaggggtgacagacagcacctggaaaatcgggtcactcccacccaaatactgcgcttttctgacgggcttaaaaaacggcacaccaggagattatatcccgcacctggctcggagggtcctatgcccacggagtctcgctgattgctagcacagcagtctgagatcaaacagcaaagcagcagcaaggctggcggaggggcgcccgccattgcccaggtttgcttaggtaaacaaagcggccaggaagctcgaactgggtggagcccaccacagctcaaggaggcctgcctgcctctgtaggctccacctctgggggcagggcacagacaaacaaaaagacagcagtaacctctgcagacttaaatgtccctgtctgacagctttgaagagagcagtggttctcccagcacacagctggagatctgagaaggggcagactgcctcctcaagtgggtccctgacccctgacccccaagcagcctaactgggaggcaccccccagcaggggcacactgacacctcacacggccgggtactccaacagatctgcagctgagggtcctgtctgttagaaggaaaactgacaaacagaaaggacatccacaccaaaaacccatctgtacatcaccatcatcaaagaccaaaagtagataaaaccacaaagatggggaaaaaacagagcagaaaaactggaaactctaaaaagcagagcgcctctcctcctccaaaggaatgcagttcctcaccagcaaaggaacaaagctggatggagaataactttgacgagctgagagaagaaggcttcagacaatcaaattgctccgagctacgggaggacattcaaaccaaaggcaaagaagttgaaaactttgaaaaaaatttagaagaatgtataactagaataaccaatacagagaagtgcttaaaggagctgatggagctgaaaagcaaggctcgagaactaagtgaagaatgcagaagcctcaggagccgatgcgatcaactggaagaaagggtatcagcgatggaagatgaaatgaatgaaatgaagtgagaagggaagtttagagaaaaaagaataaaaagaaaccagaaaagcctccaagaaatatgggactatgtgaaaagaccaaatctacgtctgattggtgtacctgaaagtgacggggagaatggaaccaagttggaaaacactctgcaggatactatccaggagaatttccccaatctagcaaggcaggccaacgttcagattcaggaaatacagagaacaccacaaagatactcctcgagacgagcaactccaagacacataattgtcagattcaccaaagttgaaatgaaggaaaaaatgttaagggcagccagagagaaaggtcgggttaccctcaaagggaagcccatcagactaacagcggatctctcggcagaaactctacaagccagaagagagtgggggccaatattcaacattcttaaagaaagaattttcaaccccgaatttcatatccagccaaactaagcttcataagtgaaggagaaataaaatactttacagacaagcaaatgctgagagattttgtcaccaccaggcctgccctaaaagagctcctgaaggaagcgctaaacatggaaaggaacaaccggtaccagccgctgcaaaatcatgccaaaatgtaaagaccatcgagactaggaagaaactgcatcaactaacgagcaaaataaccagctaacatcataatgacaggatcaaattcacacatgacaatattaactttaaaggtaaatggactaaatgctccaattaaaagacacagactggcaaattggataaagagtcaagacccttcagtgtgctgtattcaggaaacccatctcacgtgcagagacacacataggctcaaaataaaaggatggaggaagatctaccaagcaaatggaaaacaaaaaaaggcaggggttgcaatcctagtctctgataaaacagactttaaaccaacaaagatcaaaagagacaaagaaggccattacataatggtaaagggatcaattcaacaagaagagctaactatcctaaatatatatgcacccaatacaggagcacccagattcataaagcaagtcctgagtgacctacaaagagacttagactcccacacattaataatgggagactttaacaccccactgtcaacattagacagatcaacgagacagaaagtcaacaaggatacccaggaattgaactcagctctgcaccaagcggacctaatagacatctacagaactctccaccccaaatcaacagaatatacatttttttcagcaccacaccacacctattccaaaattgaccacatacttggaagaaaagccctcctcagcaaatgtaaaagaacagaaattataacaaactatgtctcagaccacagtgcaatcaaactagaactcaggattaagaatctcactcaaaaccgctcaactacgtggaaactgaacaacctgctcctgaatgactactgggtacataacgaaatgaaggcagaaataaagatgttctttgaaaccaacaagaacaaagacacaacataccagaatctcagggacgcattcaaagcagtgtgtagagggaaatttatagcactaaatgcccacaagagaaagcaggaaagatccaaaattgacaccctaacatcacaattaaaagaactagaaaagcaagagcaaacacattcaaaagctagcagaaggcaataaataactaaaatcagagcagaactgaaggaaatagagacacaaaaaacccttcaaaaaattaatgaatccaggagctggttttttgaaaggatcaacaaaattgatagaccgctagcaagactaataaagaaaaaaagagagaagaatcaaatagacgcaataaaaaatgataaaggggatatcaccaccgatcccacagaaatacaaactaccatcagagaatactacaaacacctctatgcaaataaactagaaaatctagaagaaatggataaattcctcgacacatacactctcccaagactaaaccaggaagaagttgaatctctgaatagaccaataacaggatctgaaattgtggcaataatcaatagcttaccaaccaaaaagagtccaggaccagatggattcacagccgaattctaccagaggtacaaggaggaactggtaccattctttctgaaactattccaatcaatagaaaaagagggaatcctccctaactcattttatgaggccagcatcatcctgataccaaagccgggtagagacacaacaaaaaaagagaattttagaccaatatccttgatgaacattgatgcaaaaatcctcaataaaatactggcaaaccaaatccagcagcacatcaaaaagcttatccaccatgatcaagtgggcttcatccctgggatgcaaggctggttcaatatacggaaatcaataaatgtaatccagcatataaacagagccaaagacaaaaaccacatgattatctcaatagatgcagaaaaggcctttgacaaaattcaacaacccttcatgctaaaaactctcaataaattaggtattgatgggacgtatctcaaaataataagagctatctatgacaaacccacagccaatatcatactgaatgggccaaaactggaagcattccctttgaaaactggcacagacagggatgccctctctcaccactcctattcaacatagtgttggaagttctggccagggcaattaggcaggagaaggaaataaagggtattcaattaggaaaagaggaagtcaaattgtccctgtttgcagacgacatgattgtatatctagaaaaccccactgtctcagcccaaaagctccttaagctgataagcaacttcagcaaagtctcaggatacaaaatcaatgtacaaaaatcacaaacattcttatacaccaacaacagacagagagccaaatcatgagtgaactcctattcacaattgctaaaaagagaataaaatacctaggaatccaacttacaagggatgtgaaggacctcttcagggagaactacaaaccactgctcaaggaaataaaagaggatacaaacaaatggaagaacattccatgcgcatgggtagcaagaatcaatatcgtgaaaatggccatactgcccaaggtaatttacagattcaatgccatccccatcaagctaccagtgactttcttcacagaattggaaaaaactactttaaagttcatatggaaccaaaagagagcctgcatcgccaagtcaatcctaagccaaaagaacaaagctggaggcatcacactacctgacttcaaactatactacaaggctacagtaaccaaaacagcatggtactggtaccaaaacagagatatagatcaatggaacaaaacagagctctcagaaataacgccgcatatctacaactatctgatctttgacaaacctgagaaaaacaagcaatggggaaaggattccctatttaataaatggtgctgggaaaactggctagccatatgtagaaagctgaaactggatcccttccttacagcttatacaaaaatcaattcaagatggattaaagacttaaacattagacctaaaaccataaaaaccctagaagaaaacctaggcaataccattcaggacataggcatggggaaggacttcatgtctaaaacaccaaaagcaatggcaacaaaagccaaaattgacaaatgggatctaatgaaactcaagagcttctgcacagcaaaagaaactaccatcagagtgaacaggcaacctacaaaatgggagaaaattttcgcaacctactcatctgacaaagggctaatatccagaatctacaatgaactcaaacaaatttacaagaaaaaaacaaacaaccccatcgaaaagtgggcaaaggacatgaacaggcacttctcaaaagaagacatttatgcagccaaaaaacacatgaaaaaatgctcaccatcactggccatcagagaaatgcaaaacaaaaccacaatgagataccatctcacaccagttagaatggcaatcattaaaaagtcaggaaacaacaggtgctggagaggatgtggagaaataggaacacttttacactattggtggcactgtaaactagttcaaccattgtggaagtcagtgtggcgattcctcagggatctagaaccagaaataccatttgacccagccatcccattacttggtatatacccaaaggactataaatcatgctgctataaagacacatgcacacatatgtttattgcggcactattcacaatagcaaagacttggaaccaacccaaatgtccacaaatgatagactggattaagaatatgtggcacatatacaccatggaatactatgcagccataaaaaatgatgagttcatgtcctttgtagggacatggatgaaattggaaatcatcattctcagtaaactatcacaagaacaaaaaaccaaacaccgcatattctcactcataggtgggaattgaacaatgagaacatatggacacaggaaggggaacataacactctgcggcctgttgtggggtggggggaggggggagggatagcactgggagatatacctaatgctggatgacgagttagtgggtgcagcgcaccagcatggcacatgtatacatatgttactaacctgcacgttgtgcacatgtaccctaaaacttaaagtataataataaaaataaataaaaataaaaataaaataatgtatagaagaacaatctcaatttcaaaaatgcacctacaatgtgtgaaacaccatatgagtactgaggacataatgagaattaggattatacactgattagggcagtgtcccaggtgtgaaagctggttaatttctgctctaaaatgtgctttgaaaaaggtttgtttatagattaagaccacccattgcagcatggagtttttatgcattaaaaattttttccaagcaattctgtttattcagtgcttgctctatgccctgcacactgttacatgctgacaaaacaacaaaaataaaatagatcagacactgctccccctgtgggtgggtgcattccggtggggaaaagctgagaggaggacaccaaccctcacccagaatcatcctatcagaccacactctctccagcaaaagaacacagggaggcttcttcatttagaaggagcgaagcctttcattgaaaaatctttcttgatcctagtaagtgccaacgtctctgtcttttaaaattgtttccattttgactgtgacctttgtataatgaggtgatcaagctgagctcttccaaggtgaggccaaaccattgctgtccccctgcccctctgagtagccctgactccctcctcactgagccctcgtattctatttgctgtttggactgcagctaaacattgagcaagcgtcttcattaaactgtccagtgattcatagctgccttccccccagaggttacacataattcagaactcatcagcacgctggggacaggcggccgaaattgctccttctgggatctgctactttgcatttgcccacttggggtttcatttgctaccctgggatctaattactctgccctgctctgcccttctgaggttcctgagtccccagccctctcctgaacagctaaggagctcagaccatggcctctgttggcgtcaacagtggggccgctctgtgcaaaactgtagcccccctgaggtgaggctccctcttggaaggaaacatccttcatgcaggggacctacggtggcaaaccaggaagcagtctgtccttgatggtctgcagtagtaaggcgagaagggtcacagcaagagacagagccaaacttgtcactcctggctctggagtgtggcgagcagaatacacctctcacaccctcttgtacttttcctctgagcctccctgctggctgatttctggtttcggcaggctgggatttggctgagtcatggagaagaggacaccctgagtcactgagacctaactggacaaactgattcatcacaaactgtggaccattgggacctgagtgttgaagaagaaatagatggtggaggatgagagattgttctcaggtctcctttacttggagaggagaggggccccagccacaaaccaaccaggagcggggaagacaggttgaggtgggtgtgtttgaccagagcctgtggagggaggtaagtatgaggccaatagctcctgagatccttgctaggaaatccatcaggccatgtgtcgccagtctacaccgcactgacctcacagaggtcagctgatgcccagcaaatcattcccacccccacctcagcccctgtttagcctccaccctcaccctcaccctcacccttcctcaccagccctatgctcaggcagcccctgcttcttaccagtgaccaataataattaaatcagcatcaggcctacctctatggtaagcactctacctggatgacctgatttaatcattatagtcactccatcgggaaatggtaactactaagattactttcattctactgatgaagaaaatgaagctcagagaggtgaagtcattttctcaaagccacacagcaagtagctgcccaagccagagcttgacataggagtgtggctgtggtgatcatgcactggctgatctgtctggggacagcccgcactaacctcctcaatccaggagagtcttagccatactcttgttttcctggaccacctataacttctaaggtgcatgggtgtttgcactggtgaggccaagtgtctgctttttctttaaaaataccccaaagtaacagaaatagcacagtcatcttaggacactgggcatccctctttttctgaccgctttgatgtacttgggttgatggaaacatattgcctctaagaaattccagctgtgtgactaataatgaaggcaataatagcagctaacgttcattaggcacctgttatgctcggctctgtgatgagtgaagcagggaatattgttctctccactttagaggagaaaagaggcacagagaggttgtgccttgcccaaagtcacacagcttgggcagtagcagagccaagtcttggcctcagatcccactgagccctttaatccctgtgcttcatggtctgggcacgtcctgagttgtgctggtctcagccccgcagtcagtcagagcatctgatcaggcatcatgcgttgaaaacctactacaagccaggcaaaggaagggaagaggagtctcgggcagtggtctgcagtggagggtgggtgagggtcccaggccaggaagaacagtctcagggtgatgggatatttgagtaaggcaccaaaggaacaaatggtgtcaggaaaaggggaagtaatttggagcagggacctgaatgaggacagggttaccaagggcaagatctaccttcgctattttgtattaactctgtttagggcctgtggggttatttgtaggagtgcctcatagggacttatttgatgatgggaggtacctgaatcaaggagctgggaaagataactttgaactgcacttagctacaaaggctgtgtgtgtgtgtctgtgtgtctgtctgtgtgtgtgtgtgtgtgtctgtgtgtttttaaggaagagatatggagaatgccaaataactatctttttgtcatttttaacaattgcaatgagtttttggggtgactattttggtctgttttgtcatcccatatacatgcagggctgctatattataattctgcaggcttaaagtgttctttaaatttctgttcaatttacagagacaaggttttgtcttacacgtgccctccagcttactatggctcagctcattcccttccaatgaaccgaactatttttaattcatggtagcactttgctactcattcagcaatttcatttcaacattctccaatgaatgtgtgcccctactggtgagttaatactgctgctacaactgtgatccattcctgtaacatgaagttcaggcacttctaacttttagttttgcttaaaatgaacttgtaacttcctaccatccccatttggatgcttgtataacagaaagtgttttagctttattatttgtgcatgagactcatttttggcttagaagttctacctagctcaatgcctgaccacagaggaacttatgccccaatttcctcccacacagaccttgataaaaattcttcctacttaaactcttaggatttttttcgtttcttcttagtgtattgatttggacttagggggtctcaaggaaaaatggaatttccctgggatcttaagttccctctagccagcttgtaacaaagctgttcagggcagtgagagaaccccacagctggttttggggaacaatttcagctttactcccatttctatatctcaatgaaaggtgacaatataatcaaggagaatctcatctttacattcgaaaagaaaacctatactgctgaagtcatttaaaaggttgtggttaatggtcagaagcatttgggtttattcccagctcaacagatgtatgaccgtgagcaagcctttttgggcctcagtttcctcatttgtaaatggcgatattaataacatccacctgatacaactaaaaagaactggataagatcatgcatacaccaagaccgatgcatagtaaatactaaataaatgttagctctattagtcccagggcactgacccagagaacgcttggctccaatacttctgctattaactgtaatattaatatatcaaggtagagaggaactagtataggcatatgcagcagctaaaactatgacctttttttggtggttgctattataaggaatgattgatttttatcactaggaacccaaactgtctcttcagtaacatttctaatcatttgctagaacattctttgacaatcagagttttctgcctgtgctgttgaatggtcctcaaaatagaacagaaacatcagattgagtctatcttgtggtaaatgtgtaacattactataatgtgacatcagccaatgccattgtcaatcaaactcaccacactgaatccttggtgagtttggaattcacgttcccatcttcttccaggaagatgtccatttgcaaattggcatcattatcatgggcagagaaataattggtaacaattcttgctggtattccaaggcatcgtaaaactacaggaaaggacagaccacagctaaacacatcaccagcatttaataaacacagagtgaaaaaacccttcttgtaggggactttcttcctgacccaacatgaaaagccctttggacatgttattctcaaatgttccatgctggaaaagggtggtcattcaaccccatgggggcggtagagagaaatcttgctgtgtgatccttcagaattgcagctggtgtcaggtgaagccaactagagtagaatcccaacagggttctaattgtttcgtttctaagcgtttgatcatcaacgtagtattattttagtcccatgaatgggactatgttcccgaaaatacaattttaaaaacccactaataggaagttaggaatttacagagtaggtccttggtggaatttgctgtcttggccagaatttgctcctgtgacatgcattggtgggtgacaccacagattcattttagttcattttaatagataacaaattatctgaatacctttcttgccatatgtacctactgattaaacttaatccaaatgccctccctgcctcccaggacaccagacatcagggctcattgaaaataattcagctgacaattttaagattaatgacttggcttgcctttttattttctccttcagaatagtttagcatttttaaccaaagactacccacctccttcaacagaacaaccttggaagtccaaactggagtctggtagagattcaagggtccccctccttaaaggacttgatcttaatgccccaaacaacagtggcagctgccacgggcctcccgttcccattttcctttcttgattttcagccctgttcacccagggtcttatcaataaaacgattgccactctcattctgtttctggctgaacactaattcacattatcccagacacgacttggtcaagactctgccttactcataatttcaagaaagtgaggcttgactttagggcacctgttcctccttcccccaatttccatcttcaggtttactctcgttgtgacttccccactgtgtgtttctgccttttcttgatttaccgccaaagcctgttttcaggcatagattggataacctttttatgccaaagacacgaacggatgtaaggtgttcactattttatcttgttgtgagccggaaggaattacactgggatagtgaaattgtaggcatggggagaacttgggtcctttctgtcttctaaaatcatttcacaagagtggttgcctctgttgggcatcttttaccttgtcttggtttgggagcctcgagggatgggatgacctccaacctttaacctaccatgaagttccggcttctatctggaacttcagagaccagtgcttctaggggactatacttttgattttcattgctcccaagaaatatgtattccttcttccctgggttatatttaaatggctaagaaaataatcttatcctgtttgatactatgggaaaataaaacaaaacaaaactcatgactttttttttttaaatttagatcaccaagtcttagactgttgagactttgagctaaaacaaataggttttgtaatcatttttttaaatgacctccctccagcctccaacccctccctttgtttttgatttaaaaaatgttagctaggtaaaaattctttattaatgagcaggcagaaaggacaccccaacttgagcttaatgtttctccaaggctgtagaaatgacttgtgaatgaaaatcattaccagtgatgaagacatactgaaataaatgtatttttaaaaatattcactgaattaattgtaatatcgtctgggtctagagaggcaaatgcctctgaaaaatgatgcatgacactgaagagaataattctgttctcatatgctttcctctacagattggatgttgggtggattaaaaaccagaggggaaactggagagggaaagattgttcattatgttctgatctctaattgctcaggggcattgagaaatgtggaaaaatgaatatgagaccacctgctataataccttccataactgggataaaaattaagtggatatatttataaaattctcaataataaataaatacgcatatttatacaacttctcaatgataaataagcaatatatatcttttgttatttattattttagttttaactgttttagtttttttaaaatgtggtggctgaaaagaaaatggcttttttctctatatttttactgtaaccctctatttcttcgggtgttaagtgatggattacacaggatatagtctatcattctttctataaagattctgcagtcaaagagaaactatgagcatatttggcccactacaatttaattatgcattgactacatcccagaatggctcacccataaattctatagtgtcaacaggggctgctatgtctctttgttaggttatagaaaaaatgtcttagagtgaagtttcctttatattaaaaagaaattactcagttggatacttacatgtgttaaagacaccagcaaaaacccagcattggccataccggactggattctcagagctccggtattccaatagaatgtcaacgcttccagtccaggccgatggggggacgccataggcatagatattgtcccaggatccaacgaggacaccttcgtcatctttggcattcacctaaatgagtccgtgagaagtgagaaggaagaaagttcatttaggtttgtctactccaggctatgcatggcgcaagctatggctgccattgccttctatatgttgtgcccagtgaaaagagttccacttctgttcggtttaccattacattgttagaaaaaaaagatgcaaaaactaaatacgcaagaggagaccaagtaaccaagattgcctgttaaatcgcatattatagcaaggcaaagttgaacggcagataggaggagtgtgacacctaccggattggaagaagacatacataggacacttggtttgggctaggttagtgctcaagaatgatgtggggaagagaggaagaagacctacaaaagataaaatctcaagtagggaacttgtcttggtggaaagataactcaaaactcacaaatgagaaattagtggtctaatggattttgactttcattttgagtggtagactctaccgacttgaaaaagttaacagatgttgtcattttgagtggtagactctaatgaattgaaaaagttaacagatgttgtcttggaatcattaagagttaagaaaatagattcccatgggatgcttacagaggttttttgtttttgtttcttttttcttttcttttctctctctctctctctttctttctaagataaggtctcgatctgtcacacaggctggaatgcagtggcacgatcatggttcactgtagcctcgaactcttaggctcaagtgatcctcccacttcaggctcccgagtagctaggactacaggtgtatgctcggctaattaaatttattttttttgtagagccagggtctccctatgttgcccaggctagtcttgaactcctgggctcaagtgattctcctgcctcagccttccaaagagttggaattacaggcataagtcaccatgcctggcccagagcttctttttccctttgtaaaattcacttaagtattctttcttatgattgtttaaacagattaaagttttagagttttcttagaaggtatttctgtttccataaagaacctgggatgttatggtttaaatatggaagagactttagcagagaaaggcaatcttgaatatctggataaaacttgccacaccttcagactacattcatcttgtagcagcagacctaaagtgcaggagcaaagaccttttgtgtttacatagtaaaacaaaggccaagaggtaacagtttcaaggcatcttgccagtttttttctgggcactgctgaatctacctctcttggtgtaacgttgatcatgtttaattacagtcagaagagtttaggtggggagtccaggagcttttccaaaaactggtgccatttcaacaatgtttacattgacattacaatggtgtggagccttgctacttgaggcattcatggatcagcaatattggcattccctgggagcttgttaggaattcagaatctcaggcccctcccagaactcttgaataagaatttgcattttaacaagatcactgggtgatttgtgtgcacattcgtttagaagcacaggtctgagttataatgcaaagacattagtaagcaatgtgaaacatatgattgaagcatgtgtgttttgattatgaaaatcacagaagagacattaaaacatggtgagcttttatgtgtttgctgcctcaccaactaacaactcagcctcatcacctgcctagacccctctttttgacttgctgtgtctagttgtagagaagtctgtcttccccgctggtttatcaattcattgggaacaaagaaaaaaaatctccgtctttctgagttttaccaagtgttagcaaagactggatgctctgtagttgttcaataatcacttatatagtcaacaaacatataggaaatgtatatttgagtaagaataagaccttatgcctggagagagatggtcaagaaaccaatcaagtggatgtaaagattactggtattaagacagaaaaatgtagaggtagagtgggaacctgaggaagggagttatcagttagattggagggtggtggtggtgatgctggggggcctaatagagggagatgacaggcaaactggccagaaaaggccatctacatagtggaaacagttttaataaatgtgtagtgtcatgaaacaatatggcaggctctgggaccttctaggagctctgcatgggtattatgtaagtaggcaataccgaacgaaataaaaaaaatactagaagaaaacatgcaagatgtgcaagcatcttttactgtgaatgacaaagccttcactgaaatttgagatttactctagcactgagtggtatttcccaaggagggtcccttctggggagtgttgtctagaagatcactattcaatttggtttagacatgctatcttccccctttaactctgtgtccagtcaggttaaagtgaagaagaactttatgaaccacacagttaatttgttcaatgtaggaaaaaatgaactctttgggggtctctaaaagaccttgctcagctaattgcaaactcatgcctttgatataaattttgactttagcttatagagtcatgaaatgactggagtgcagcaggctttagccaaacattatggctatattaaagatcagtacttctccttgcagttggattgattatttaaaaatctgtatccattatcgtgaagattgaagaatgccttggtaggctatgatgtggtttggtctttgtgggtaggtaggtttagctttgaactcacattatcattcccttatcactgagacataaaataggctctatgaatttcagaggtaaaggctcctaaactgtggtcctgataactgattttcaaacagatagccattaattacaagggctatttatagcatagggctgaactcaatcagctaaggggaagagtaaggaaaaaaagctctgtcctctacagaccttttaattgttaatgctgagctgttcccctgttgctagataaatcacaaccctcatttattagcatttgggcagattagctactgttttctaattagaacattgatttctagggagctcaggccatgaaagaggtaagtttttagtgacagatgtaaagggttaaaataatatctcccctcataagcaacaagatatgtttggaggacatgtttgtcatttttcatgccacagttggctgttttaacaccctctcatgatctcagggtttgaccagtggcagaataaagtgtcttggtcttgagtcactggtggtcaagtagacaatacaagtccaggactacgtacaggaggcattattcaacttcattaaggctacactaaattgccctcccataatacctacaaaattagaaaaaaatttcaaaaacccctaaaagtcattatcagcataatgcaataaacttcaaaacatggtcccaacaaaacatgaggactatggagtaaagcagagaggcaacatggctcagctcctaaccttaaccatcttaccagctagtcaacaaaaacctgagatttctaatttatattttaaattctagaaagtaataaatataatcaaaatgctgatctttttggccaggcatgtaatcccagccctttgagaggatgaggcagatagattgcttgaggtcaggaattcaagaccagcctggccaacatggtgaaaccccatctctactaaaaatacaaaaactagctgggcatagtggcacatgcctgtagtccccgctactctggaggctgaggcaggagaatcgcttgaaccggggaggcagaggttgcagtgagctgattgtaccactgcactccagcctgggcaacagagtgagatcctgtctcaaaaaaaaaaaaaaaaaaaaaagctgatctttttattgttctgaacagaatggtggaaacacctgctgtggagaaacgagtgaaaaagtatctgcaccttaaaagaggtagagattctggaacacaattgggaaataatacaagctgagcgtatcccccaatggaactgagatatgcctccagttgtgggggtgggttctggagtgacagatgtaggagaatcttaagggaaagagcagaccctaagcatgataccaaagattgttcatcttctaatactgtagtcctcactccaatctcttgcagagtactgaagagtagatagaatgtggtacattggcctcaaattgtagttcagaagtgagatcaaactaaccttagattgagaagaatttcatttattacagcaaatagaacgtctagagacaagaatgatgcaagtttgagcataaatatagggaaaagaaactgcatgcagaggaagagacagaaagagagagagggagagatcatgaaaaaatatacatagaagaaaacgaaattaaggagcataagtcatttttctcacaaccttttaggagatcacagaccaaggcaacaaattgaggaccaaatcataccattacagagctaataataaattataaactgcaagaaacagaatacatattattaaaaataaaaattaatgacatagaagaaaacttgagatatcaaagaaaatactaataaaaaaccaaagtgatgaattatttagagagattctaatagtaccatagttatggaaaacaaagatgatacaacataaggatgattagtgtccttaaaatagagaacccaaggatttggatcatcatggtggatgggaggcaggactggattgcagctctggacagagcagcatgtggaggctcgtgctgtaaattttagatccaggtcgactgcaagaacaaaccagcaatcctgagaggaccacagactctctgaaggaagcagactgcttctgcaggacccgagagacccccccaaatactgtgagtgtcccaactatgcaagtgggaaagggagaccctcctctcccgaacacaaacctccactggagaagctgaaggtctgtttgtgggagaagtttccgacttcacctggtgctgggtcaacttggagagctgagggaaatacaggggtagaggaagcagcagaaaggccctgggagcttgctaggtcccctagcaggccatccctgcctggcaccacagagatccatcagaaaggtggacagaggagcagaggataaaactccacatggagaaggaaatctctagctgaactttgtagcaatttgaatggggtgagaagcctcctggccaaaacttgggggagggtgcaaatccggtgtgcagactccacaggtgtggaagaaccaaacccttttcttttgcagctgggaggtgggtagaccgggtcaggttttcaaggccatcttgccctctgcctggaaatggacttagggctgttgaggggggcacggtgggagtgagactggccctttggtttgcatggcagctgggtgactcctgtgactgccagcttcccccaacttccctgacaacctgcatgactcagcagaggcagccataatcctcttaggtacacagctccagtgacctagaaatctcacccccatcccccacagcagctgcagcaagacctgcccaaggagagtctgacctcagacacgcctagcccagcccccagttgatggtcctttcctacctaccctgctagtggaagacaaagggcatataatcttgggagttctggggccctgcccaccactggttcctccccatactaccacagctactgctctctggaaagcaccacctcctggcagggagccaaccagcacaaaaatagagcattaaacaccaaagctaagaaccctaacagtgtccattgtaccccctgccacctccaccggaataggcgctattccggtggctgagagggacccagagatggctcacatcacaggattctgtgcagacaatgcccagtgtcactccagagctgggtagacttgctgggtgggtagacccagaagagagacaatcactgcaatttggctcacaggaagccacatccataggaaaagggggagagtactacatcaagggaacatcccatgggacaaaataatctgaacaacagccttcagccctagaccttccctctgacagagcctacccagatgagaaggaactgtaatatgacaaaacaaggctcttcaacaccccccaaaaatcacactagttcaccagcaatggatccaaacaaagaagaaatccctgatttacctgaaaaagaattaaggaggttagttattaagccaaacagggagggaccagagaaaagtgaagcccaatgcaaggaaatccaaagaataatacaagaagtgaagggagaaatattcaaggaaatagatagcttaaagaaaaaacaagcaaaaattcaggaaactttgcacacacttttacgaatgcgaaatgctctggaaagtctcagcaatagaattgaacatgtagaagaaaaaaattcagagctcaaagacaagttctttgaattaacccagtccaaaaagacaaaggaaaaggaataagaaaatatgaacaaagccaccaagaagtctgggattatgttaaatgaccaaagctaagaataatcggtgttcctgaggaagaagagaattctgaaagcttggaaaatgtatttggggtaataattgaggaatacttccccggccttgctagagacctagacatccaaatacaagaagcacaaacaacacccaggaaattcattgcagaaagatctttgcctaggcacattgtcattaggttatccaaagttaagacaaagaaaagaatcttaagagctgtgagacagaagcatcaggtaacctataaaagaaaacctatcagatgaacagcaaatttctcagcagaaaccctacaatctagaagggattggaaccctatcttcagcctcttcaaacaaaacaattatcagccaagaattttgtatccagcgaaactaagcatcatatatgaaagaaagatacagcctttttcagacaaacaaatgctgagataattcaccattaccaagccaccactacaagaactgctaaaaggagctctaaatcttgaagcaaatcctggaaacacatcaaaacagaacttctttaaagcataaatcacacaggacctatgaaacaaaaatacaagttaaaaagcaaaaacaaaaaacaaaaaaaccaaagtacacaggcaacaaagagcatgatgaatgtaatggtacctcacatttcaacactaacattgaatgtaaatggcctaaatgctatatttaaaagatacagaactgaagaatggataagaactcaccaaccaactgtctgctgccttcaggaaactcacctaacacataaggactcacataaacttaaagtaaaggtgtggaaaaaggtatttcatgcaaatggacaccaaaagcgagcaggggtagctattcttatatcagacaaaacaaactttaaagcaacagcagttaaaagagacaaagagggacattatataatggtaaaaggccttgtccaacaggaaaatatcacaatcctaaacaaatgtgcactgaacactcaagttcccaaatttataaaacaataacaaatagacctaagaaatgagatagacagtaagacaatagtagtggaggacttcagtactccactgacagcactagacaggtcatcaagacagaaagtcaacaaagaaacaatagatttaaactataccttggaacaaatggacttaacagatatatacagaacattttatccaacaaccacagaacacacattctaatcaacagtgcataaaactttctccaagatagaccatatgataagccataaaatgtgcttcaataaatgtaagaaaattggaattatatcaagccatctctcagaccacacagaaataaaactggaaagcaactctaaaagaaaccttcaaaaccatgcaaatacatggaaattaagtaacctgctcctgaatgagcattgggtcaaaaacaaaatcaagatgaaaattaaaaaattctttgaactgaatgacaataatgacacaacttatcaaagcctctgggatacagcaaaggcagtgctaggaggaaagttcatagacctaaaggcctacagaaaaaagaccaaaggagcgcaaactgacattctaaggttacacctcaaggaactggagaaacaagaacaaacaaaaccctaacccagcaggagaaaagaaataaccaagatcagagcagaactaaacaaaattgaaacaaacaaaaatacaaaagataaatgaaacaaaaagctggttatttaaaaagataaataaaattgatagatcattagcaaaattaaccaaaaagagagaaaatccaaataacctcactaagaaatgaaacaggagatattacaactgacaccactgaaatacaaaagatcattcaaggctactatgaacaccttaatgcacataaactataaaatctagaaaagacagataaattcctggaaaaatacaaccctcctagcttaagtcaggaagaattagatatcctgaacagaccaataacaagcagtgagattgaaatggtaattaaaaacttatcaacaaaaaaatgtccaggaacagacggattcacaggagaattctaccagacattcaaggaagaattgctaccaatccttttgacactattccacaagatagagaaagaaggaaccctcccaaattcattctatgaagccagcatcaccctaatacaaaaaccaggaaaggatataaccaaaaaaggaaactacagaccaatatccttgatgaacacagatgctaaaatctttcacaaaatactagctaactgaatccaacaacatatcaaaaagataatccgccatgatcaagtgggtttcataacaggaatgtggacatggtttaacatacacaagtcaataaatgtgatgcaccatataaacagaattaaaaacaaaaatcacatgatcatctcaatagattcagaaaaagcattcaacaaaatccaacattgctttatcattaaaactctcagcaaaatcagcatacaagggacataccttaatgtaataaaagccatctatgacaaacccacagccaacataatactgaatgaggaaatgttgaaagccatttcctctgagaactggaataagacaaggagtcccactgtcaccactcctcttcaacatagtactggaagtcctagccagagcaataagttaagagaaagaaataaaggacatccaaataggtaaagaggaagtcaaactgtcactgtttgctgacgatatgattgtttaccttgaaaaccccaaggactcctccagaaagctcctaggactgataaaagaattcagcaaagtttctggatacaagattaatgtacacaaatcattagctcttctctacatcaacagtgaccaagtggagcatcaaatcaagcattcagcccccttttacacacattgtcgaacatgaagtacttcagggaatatggtacctatcataaccaaactattaatacttgaaagtgatatcaaaataattaggggctgagtcaaacaaagaacccaggaacagagactctgtgataacagattcaggggtgagaaaactctatataagttaagcatctttgggatttacagttacagatgaattttaagacttgataatataaaaacaataatcatcctaagaaaaaagataggagaaagaggagaggaacagtgaaaatggtaatgttttagtgtgtgggtctctcagttaattgataccatctaacattaaagtataatttaaaagtacataattactttattcttttaatggtttttataatttttaataaccttaggaaaacctgttaagaaatgatatctcttgtagtgaagaaatatttatttgaagtttaataatttcttctgttgcaatttaatttctttcctattaaagtaaaattcaataaaacttaaaattaaatagaatttgggtacaattacatgtaatactttcaaattaagtagcatgacaccatttggtataaatacaaacagatcaatgtgacacaatagagaacacagaaatagactcacacaaatacagttaactaatttgtgataaagttgcaaaggaaattttatggataaaggataatcatttcaaaaaatgaggtggcatcaattggatattcatatgcaaaaatacgagctttgattcataccttgcaccatatgtaaaaatgaactcaaaatgaaccttagacctaaatataaaacctagggttataaaacttctaaaaggaagcaaaggagaaaattgtgtgatcttaggttaggcagtttccttagataaaatatgaaaagcatgatccataaaaaaatttgtaaatcagacttcataaaaattaagaacctttgctctttgaaaggccctgtgaagagaatgaaaaaataaaactagagtggaagaagatatttgtaaatcctttatctgattaaaaagaaaaaacttgtatccagaatatgtaaagaacccttgaaactcaatagtaagaaaacaaacacaaccttaaaacaagagaaaaatattggaacagatattccatcaaagaaaatacgtgggtggccaatcacaacaaaagatgctcagtatcatcagccattaaggaaatgcaaatcaaaaccacagcaaggtaacattggacatctatttaaaagtctaagattaaaaagactgatcatatgaagtgtccgggaggatatgcaacactttagactctcatatgctgctggtgggaatgtaaaatgcccatccaatttaggaaacagtttggtagtttcttaaaaattaaacctatgtttagcttatgacccagccacctcactcctaggtatttacctaagagaaataaaagcttacgtctatacaaagacttttactaaagtcttccaagctaaagtttctggctttatttgtaagaggcaaaaacggaaaatggcctaaatgtccatccacaagtaaatacatgggcaaatagtgattcatccatacaatgaaacactactactcagcaataaagaggaatgaactactgaaacaaaaaacagcatggatgaagctcagaatacagtaaggaagcataaaagaagcctcacaaggagtacatactgcatgattatatttgtgtaaaagtctagaaaacacaaatcaatgtataatgacagaaggctgagcagtgatgggggatggtacacaaagcagggagtggtttaaggaagaaattacaataaggaaacttctgggggcaatggatatattcattattttgattttagtgttcgtttcatgggtacatatacatgtcaacattatccaattgtacattaagtatgcacattttattgtcaactatatctcaataaagctgtgaaaatcaatgaagacttttaaattaaaccagcatctatagtataatattatctatgattttaaaattatttctcctgtataattcaaagaatagaaatagccctaaaacatgacccgtactggacttctgtttaattttggtcattggaatatgagcagattctaacttgatactgaaaaataaagaaatgtgacatttcttgattcttcaatttcctgtagcgcagacctttacattttgtatagttactatttctttctgctttttaaaaaaatatgcaagggtacttttctcctctgtgtgcattttatatggctatgatgaaatgacttttctctgttataaacctatcatattccgttaaatttcattgttaaaagttatgtcctcataaaggctaggatttccataactcttttagaaaatagtcttatacctaattttgtccacaatggtttctcaaagaccattggaaatgaattttgatgttgggtaacacgaactaacatcaaaggcctagcgttaagtttggcaaggagaagaattatttcctgtagaaaatcgtttccaggttttgtgaaccacaaatccccagctacagtgtggtggtgaccagacttaatcacaggtggaagtggtgtggtggatgtcaaattgtgcttcatgacatgctagggttttgcaaaagaaactcagtagttacggtgttgtggggtggggcaggtgagaattgaatgttgatagtcaaggctgcagtcaccacctttctttaataatagctgctctgctttttctcttttatgtatttggattcaattgctgtttgaaaaaattgttctaaaaaataaaatttaaaaggtcacagttctgggaatgtagagatctgtttttgtgcctgctccgccatttgccaagttatgttgtaaggataggaagggagatgagctgaaggtcaagtactcaggttattccatgggcaggcatcccagaaaatgcacaagaaaaaagaaatagggtagcagcaattctatttcttcccttgcctggctcttcatccttgattttcttctgggcttttatggcacttacaacagccagggtcacatacttggtcgaaaggaaaggaaaatcatctaccatgtctttggtttttcatagtggtttgcttaataacaagctgttttctgccttgttgttgctggaaatgttattctcgctccctggaatgtccatccacactcaaacctcttctttacctggtgccctattgatcctttaaaactcagctggtttcaccctgggaatctttacttatcaccttgatttggatgtccttactctttgatcacatagtactctttgcatagtactatccatttatcacattgtattgtgtcattggttagactgtccttgttcttttcccagactttatgttcacagaaggaaggaaggcactatgctgttttgactttatattcccagggctagcacagagtgggaactcaataagttctgttgaatgaatggatgtgctatcactggaagatggctataggctacattttaatacttctttaatagatcaagacaacgggacagttagaatgccaataggcacttcattaaagctggaaagttgtttccaaaatttacatagcaatacaaaggatctagaataattaaacataatattgaaaaagaagaacaaaaatgaatgactacctgatttgaaggtttactagaggaaagcagtaaaaaaggcagtgtggtattgtcataaggacatacatataaactaatgaaacagaaaagagagtctagaaatagatccatactcatgtagacatttgatttctgacaaagtcaccaaagcaattcaatgaagaaaatgacagtcttttcaacaaagaaactctttgcaacgaatgaaagcctttccaacagtcttttcaacaaatgctggtggaacaaatggataaatttggaaaaaataagatttgatccctacctcacacaacaccaaaaggtaactcaagatggatcatagaccacaatgtaaaagttcaaattataaagcttcaaaaataaaacataggagaaatagtggcaaacatgggcaaatagtgattcatgtgaaagtcttcatgtggaaagaacatttactggggatgactattaaagaacaatgaaaaaatttgattttataaaatttaaaaacttttgttacttaaaatatgccatttataaaatataactacaagccatagtttggggaaaatatgttctatacatatctgacaaatgagaggtatatacacagagcaactataacttaataataaaagtacaaatgactgaataagaaaatcagtagacttgaaaacatgctgcatatatatatatatatatagccaataaatgtattaaaagatgctcaaaatcattagccatcagggaaatgaaaattaaaactacaatgaaatgccactatatacccatttgattggttaaaattaaaaaggttcaagacatcaagaataggtgaagctgtggagaaactggaactctcatatgttgctggcaggaatgtaaaacagtagagctgctttggaaaactagccaattcttataaagttaaatatatacatactttctgatctaggcatgctctctttagctatttactccagatatatgaaaacacatacacaaaaacacttgtacaagaatgtttatagtaactgtattcataatagcttcacattggaaacatcttaaacatgcatcaataggtgaatggatagacaaattgtgatatacaatgcaataaaatacttcttagtaatggtaaggaaagcattgaaaacacatgtaacagttgatggagtaagagaagccagccctatttctactgtgtgaatccatttatgtaaagttgaagaatagacaaatgtaacccattgcaagaaatcagaatagtagctacctaatgaggtggggattgaccggaagaagcacgagggaaacttctgagcttgtggaaatgtctatattttgattggggtggtgattaccccaatcaaaagtcattgaattgtgcatttaatatccatgattttttactgtatgtaaattttacttcaattaaaaaaaatcctgtaactaactgtaatgaatagtatgaagcatataactaccgatatatgaatgtcctttggtatatatatgacccaagctctgataggggtgggtaattagactcatttttcatgataactatgaccacaggaaattattaaccttgtctctctcagtatctgaggatgctcatttggccaaaacatattttactaattgacaataatgagagaaataagcaaatgtggactgagagagaaaactgagatttcaaggtctccaagtgtggcctgctgttttcattgccataccactgctgcatggtgtagagctggtatagaacaggcctcaaaaatatctgaattaaaggaatggacgtatgagagagggaaaaatgcagagcaggaggaggaaaaagggaaggatgtaacaggaggagacaggggaaagaaagagggtatgaagggaacccaaggtgcatgaagctgtgcatatcctaaagggctgagctggctttgctttgctcctttgctatccatctatcctggggatgctggccccaggagaccagagcagcaccaaccgctcagcttggagggagtgctgtaaagcatccctgtgcttcagaaatagcctgtgtgattacagaatagctgcagcattgaaacctcattccaggaagcaattcagggaaagcagacatttagattgcccatgattatcacattcgagagatgccttgtaataaatgtctgtttttctccaaaaatatggggtgaagaggcataagaaatgtaagcttaataattgagaaaccaagctgtttgaccacaaatggaaacttcattacactgctggcttttaccataagagaaaaaagataatgtctgagcagttcatcgtccccccactgcccccacctgaaagagaaggattgaatcagacaggacatgtaaaaggcattatatctgtatccaaggagctcatgtgaccgggagagaggacagacagaggacaaatccaggggaaatagaacattgtgtgtgaattagtggggccaggcaactcatgacccacccccagtgctaccagcaaccttggataaagttacttaacttcctgatgcctcagtctctccacctgcactttggttatttatggaatggatttatgcaatttctcaaaagtggctatgaagatactttctgttagataaattctattttcccactggcttccaatatatctgtcaattttttaaaaatcttcaatgaacagaaatgaaaatccctggtgaataaggtgaccttatggtattgtttactttgaatacattagagaattgctttgagtctgtacctctcattcatcattgaattccctgggtcattttagaatcatagaaatgactttcattcttagaaataccttgactttaactttaatggttttctaaaaaatctttttagagttggtaatttagtactttactctgttggactacagtaacactcttcattaatataaatcagtggattctcccaaagttgtcaccccgagagctcctactaattgatatgcgttacaattggaaaggttgcaaggaacaccggaggcttctgcctttttctgctgttccaaactgagaaatttcattcctgatatgaatcatagaaagagacaataacacttttaaataaaagctgatagggttggagacccagaagctctggatggagactcaagtccatgatggaacctacatctggcagtggtcaccacctggggaattttgacctctaggcatctgtgggttagtaatgcaggtaggctgttgtcgcttttataaaagaccagatggaagttgtatctttacccccacaaagtgacaccgaatcatattcagtgtggtcatactcattatctggtagagatgattaccaccaccgccaccatcattagaagttcccattggcagttatataaatctgacacaagaatggggtaacaaggtattattacataatcatgatttgttttgatagatgaactttttcaaaaattaaaatccatatgggtaaatgcgaaaaagttccttggtgatttagaaatgccaaggacaatgcccattgagcacctgggtcctcagatgtatctacgaccgttcactccaaaaaaagaggtttaagctgctttataaaccaaaggatgggttagatattgctttgtaattaaaatttttcttaataaaactgttacgaaagtaccttgtgactggtctgtatgatcaaggaataaactttagaaataaatacaaactttatatatttatttctgtctttacagttcatttgggatgactcaggtgtgaaatttctaatcaaagtgaacttttaaatgtaatctgaatatttataattaaggtttgttgcatgaagaggtttgctcaacgtgaagcttcctataagatgaccaagtaaacaattgaaagaaaatgaacaaaacatggttttatagttaaccccttgaggagctgcttggcaagatataaaagtagttatgtcattactgtctttttcatgcatggaaagaaaaaaatctttctaaatactgggacaaaaagagggggaggaaaagatggacaaagggaaaataactttattttctgtttatctgtaggatcacagatgcatgaggatcagaagcactaaagtccatttcatctcaaaggtctacagtcattcatcttgtactgtgtcctagaaaaatccaggacctactccgaattgtggtcagtttgatttactagctgaagttcaagatttttttacaatgctaaagagtacatcgaacatcgattggttaaaaaagtttagtcatgagttagttcccaaaaggcatagtcagagcaaagtattaatggggattaatgatggcattgtggttcgatattagcaaaaggccagggttaaaaataaatgcatacatctcaagggaagctggatagtccaggatggcagcagtacaaacactgaaatttaaaaatatgtaactatattgacgtttttttctctcctcctactttcctaattttctcattaatattaccttttttcttactacaactgaatcagaataccatggatcaagtaactgtaaatgttgagatcctatggaataaacttcagttgtgtcaaccttagttttctgaattgcaaaacaaacaagcccccagaagagcaaataaccctctactacatttttcttcagtgcttttggtgactagctgtttgtatataatttccaccatggagaaagggtttcttcaaataatagcatggttaattactgtgggacctcagacattcttctatcttttgatccaatgtttagtcctgggaaacctttgagctacatttgagagatttgctttcccatacaaccctatgcttatttccatcacagaatttgccatgctgagctaaaattttctatttactagtctgtgttctctgttagactgtaagctttgtgaaggcagaaacttaattttgttcacaattgtactccagtgttcagactggtagattgccataaacatttgtcaaacaaatgagtaaatactgagtgttttaccaccatcaccaccaccactaccactatcaccaccatcataaatcaccaccaccaccacattacgccatcaccaccactaccaccatcactcccaccaccatcactcctaccatcaccaccaccatcaccgtcaccatctccaccaccaccatcaccatcatcatcactatcaccaccataatcaccctaccatcaccaccattattatcacaatcactatcaccaccaccgtcaccaccaccatcatcactaactctatcaccaccaccaccaaacaccaccaccattatcatatcatatttggtacctgatcgtctttggaagctcattctccagggccccagtgcctatggctatttagaatcctctgattgatacctttcttcacttattccccattttcaataatttgcctcatctgggctccattcccttggggctctcttcttttctaggaaatggcaattcaatcttacataattattgtgttattggcaataacgtgttgatagtggccctctaaggtaatatgatctgagagtaaggaccatatctggtttcagctcagccacttatttgctgtgtgactttgagtgagggacaccacttccaagggcttctgcttcctcacccagaagactcttggagagtcctccccattgcacacgctggttcagcatgtgtttcgacacagatcctccactggtaatgccttgacccactggagcaaatatggatggaggtggtacatgtaggtgtgtcacagtgaataacgagcctttatctgcagtagcggcagcctttgcagaagcagctgcatctccttgggggaaattctctgcccatagttgctgccagatcctatcagtcgggaggcaggaacaggcatagacaggtaaccacgccgcagtaatgccaggtggttgcacagccttcccttttccccagaaccatgctgcccttgtcacaatatgtcacggcccaccttctttgatagtctgactcagggctcagagtccatgtctggcttattcacagaaacttggggctagcaatagaatgctttattaatgccatgtgagggaagtaagtgttcggatggcacaaagttaagcattctccttagctttctctggcaattttcctggtgggaactgtcacatcagaaatgcattgaaaagaaagcagcaatcaagcaatgcaatttaaagggagaagtataactgtgggcaagtttcttcattttttctaattgcttctcttttttttcttttctctcttaaatcaatctgcagtatagcttggtaaaatgcaccactcagtatttaaaggagcctaagcaaaagttagcttatgtaaggttataatatctcaggcctaatctctagatgatgagaatacaggattttggacttgctttctcctgggaaactccaatagccccaggctgtccagattgtcataacttttcctacttttacatcaaagtgaaataacagcaactcaatataagaacaagggaagttactgaatgtataaaggaaaaaatagaagaagggagagcactattttgaagaataaaagagtattcttgctgccaatgtggtttgagtacagagacaaaatttcactttaaagacaaagatgcgaggccagcagaggtgagttatttaccctgggtcacatagtaagttaatagcacaaccagaatcaaggtccaatccctcgacacgagctgagtcgcttcccatatgatgctgccttcactttcttttcagtcaaggatgaaaaccagcaggttttgagtgagttaggaagacagattcgctatgcaggtgagaagagagtgttacttacattccataggtggagaaactgagtcacagaggggtttagtgctgtcatcctcactaagggtgatttttacccccagtagacatttggtaatatgtggaatcagtttgagttgtcacaactggtaagggaacagttatgacaacttgcatcccccaggtagaagatagggatgtcgttaaacattctacacaggacaaccttctacaacaaacaattacccaaggtcacatacaataaatataaatatactgaacaataaatatttttatctggggattgtgcacttaaaatccttttgagatggagttttactcttgagtgcaatggtgtgatcacagctcaccacaacctctgcctcccgggttcaagcaattctcctgcctcagcctcctgagtaactggaattacaggcatgcatcaccatgcctggctaattttttgtattttcagtagagatagggtttctccatgttggtcaggctggtcttgaactcctgacctcaggtgatctgcccgcctcggcctcccaaagtgctgggattacaggcgtgagccaccgttcctggcccaaattcagattcttattatgattgaaagtttgcacaatttgggttatcggtgcttttttcaacatgcacccacctgttgcctgaaaactccttgccaaccttcagtgctagacttgtcctggaccacagtaagcaaatttgtctttggggccccagtcgtgtgctctgcatcttgtccccacccagctccactctctccagatacccagcaaagactggtctgctcatcctcactgtttcccagcagcaagtgccctcaggaaagttctgccttccttcactctcacctggggatgaactgagatctatgtgctatttcttctggagagtccacatgccacctataccgctgctctggcatttgcaacctgcgaatgggatttctagcctctatgaccaggctgggaggtgtttgagaggaattcagaacaactctgcaccagcctctgttttacctgtgaggcctgggcccagcccctgagaaaacacacacagctctgtcgccctgcaacagggttctggctaagagtccacaacttcagaacattttcttgtgggctctctaggcacatcttttcatactaataaagtcaaatcattcattgagaaatttaaagattttttttgtctttgttctttgtttaactgcattcagaaatttcatgatagatttccaggatttgtgaacgggagagtatctgcctgaatgaccaaagaacacttgatctttcctctgtgtcattttttaaattgatttttggaggctcagtattttagcttttaaaattattaaaacggaacagattttggaaagattcacagaggtattctaaggtttaaaggagctaatagaggtgaaagtgtttttgaaaaccattgaatattttgtgtatataaacaagggtatgacggaaatggaaatattgctcaaaatgtctcaggtcaggacctctaccccttaacacccaaattctccccctccaaaaataaaaccaaaccgttttccaaatggattttctctgtctagttttaaatcttttaattgggatataaattttcaaacttagaacttcataggctttacatgattaataaaatctcagggcaatttgcattaggagtatgtgtgcttattcaataattaacagcttccgcttagccagctgccaccacagacacattaggttaactgcttcctgtctgcttctcttttgcactggcttctgctaggcagtgatttctgacttctgggtgcgtaaaagtacacacagtgtgtgagtaagcttatgctgatgagtgtgccattttagaatgcttaagaaggaattaatttaaatttaaccactgctagctgttgcttcctttcttactgcaaaattgttatggtaacttcaaagaagaaaaagagaaatcttgtgggcgaaacagtaaaaatagtgatcagatgcaagtctaatatatttgttataaacggtcatgacactttggtaaacatttcccaaattcaacattcccccaaatctttggaattcattggcttcccattatggaatgtaaatgcataggaaacaaaactgcctttacatgttggtttctatttttactttttatgctctgctgtttcttaaattcacatgtagcttagttattaataaaataaaagccaccattcttaaaagctaaccagaaattatatttcatatcattcacagtctaatatttttatattaacaatattgatttcatttagctcaaaagaatatacaaaccaaactcaaacataacattctttcaaaaagaggatttcttagaaaacttagggaaattggtaatataagtatttctttttttcagtctttgattgtttgaaataccacccagtttaacatttcttcagaaataatctactcttcagccagattgggtctacttctctgtaccaacatctggctctccatgttgggtacattgatataatccaggactgcatgggtcctggacatcccatttaatccacgtcctatgcctggcccacccttcccactcatgggagttctatctcctttctcagaaagttgttccactgcaagatctctgcattctcaaagttgttttaggatatcctgcagagagcggcatgaaaagtagaaaatgtctagatttgaagtcagcagaccggagttctagctgtggctttgtcactgaaagctgtccttaccctgtgtcctaacttgtaaaagtgcatgagtaatggctgccctacttaccacacaggatcctgcaaagaatcaatacccacttcgtaagtgagaaagccctacagtgacacatccttgtgacaggagttaggatgagatgtagccattcatttcttcactcttactatcagtgtgaaaattgagaaaagctgtgccttgcacatcttctgtgcaccttgatgtttggttgatcaactgtttgattatagtcattgacatttttgtcatgatcactcctcagtctctaggcaaggggttcttaagaataactggtctacagtatcattatatctatcattgttttctaaagccaaagaaacatacagtattgagacgataattttgttttatagcacatgataagctcagaaaattccaggagctataactgggtgtcagaagctagaatcttacaaatgaaagtttattaagtgtaagtcatcatttcagcagctcttaatgaactggcatatatactgaggcaaatgacaggtgtaacagattttaggtatcagtaattgctgcttaccattgcagaccccacacggctgactttgatgggattccctcttccagagaggtccatttgtgctctgtccatcacatacaggcaagtgtccaggatgccatcttcaaactatttggagaaagaaaaacaaagagaaactagtgttcactctgcaagcaaaatattctctgatgaaaaataacatgaaaccacaacctaatgtttagaaatgtgtgtttcctgtatagtgatctcccataatctttagtatgaaatattaaagtagaaggaatgagacatcttcttttgtttttcattaaagtgaataagaatataaaagcaagccagaaacataaacagaaatactagagagttgatatactcagggatcataagctgacttgaagttcttcagaaaatgattcaatttagaaggtcttttcaacatattggctcctgtacccaagaagaaggaatgaatcatttaccaaagtcaggccagagtcttaggacctcgaaagtaatgtgaatcctcgtgcatttagaaaataaagagctctcaggtgtatcacaggaaggtgcttcacactacttagtttgcacccaaaatagtaggagacctcatatagtgactgtccctctaaggtttcccctcttctgagacaaggtggaccccaggatcaaggagagggcagaaggctgcagaaagtagattacactatcaagggaggagtctggtaccagttcagtcttcttagaaagaactgctagccacaggcaataccagaattttcttaaaaaggaataaagatcaaatagcaagacaggaagattttacctatactgtacctcactgtagtaagagattttcctgaatagagaaaccttgtgtgctatccacccaagtgcttgtgacagaaaccacaatcataatggctaattaccacacaattctttattcagtccagttagaatacccactctgggtgtatcccaaactgacaggatggatgcagtaatgggtaattgcactagttcttcaggtatgcaaatagctcagtattttggttcttattaagcagcttctctcagctgtgtttgctgggcaggatagcaactaactggagagttaaggaaatagtcatagaacggattgattccctgcatcactgtaaacatgcttggctggttattctggccaaaggatacacaccaatagcctctttgagtggcagaagatacaatcaagtgactgtgctccagggtgcctacccaaaggcaagctggcgaagagtgccctgactgggcttgggacacttttccagacctccttgctgcccaccttgatgacttttccccttgttagctatctatagattgtcatatttgggccataaatagaatcaccaggctaaaggctagaaattggggacccaagacaagggcatcaggcagtaggcagtatagtcaaaggttgcatgtcactgaggaggggatggcttgaaaccagggagtcaggcaggaatccaagaacagggggtgccaactagcttgtagcttggcaggacattagaaatgcaggcggggaagcctgagcactgggcatgtaattctccggagtcagggaagctgttcacaaagccaggtaggcaggataacacgggtactggagcagtgggtaaggaacacagggagatcccatatggaagtcaaagcaaggcatccggagccaagaaagtaccctgtgaccaccagattccatgaaaactccctgctggatgcccagcgcaatgatgcacagttccagccatcccagccaaaactcctgagaaatgacattcgcccccgcttgtgtcgctaattaaaaatcattttgaaatcacaggacatgcattcatttatggaaaattggtaaaatatcattcatttgctccattgttaaagataccaaactgaaatagtttgaatgactgaacatcttaaagaaatgccatttgctactttgtgtctagacaatcaacttgcagctgataaaatctttctatgtaaaagctcagtggcccttcctttgatgaaatgataacactcttttctaattagcagtaccctaggctaacacttaaaaaaaaaaaaaaagaagctatttctttgaattgggcacaccccttgcagtattctttgcatcactttgaaaatacctttctttataagccaggttgaactaatgagatttcactgttctaagtggccaaagcatttctcaatagaatgccacattattcatggaatctctcatttctgtaacactgtaatacccagagatatgtggtttcagctgataaattacgcagttgtctttatgagtccctactcctatgctctctgccttggagtctcagatcctaaaaagcaggaaattgtgcttgtctaatatcgatatatgggatcctgtagggatacatgtgacaaaaaatatgaagtaaaaatgtccttgacaataacaaattttaagtggctcacctgaccatagctccagcttctggtcttgatgtcattgacctctccataaaaaattaccccgatgtcattcaggacatactcttctctttctttctcattgtccagatacacagcatcatctgcatcagggtttaaacatagtgactattaccaaaccagactgtttccaaacacttgcaagtttatgcaagtttattttgtttctaaactacatttaatcagccaaatttttaaaaaatgccctttgtttcaccaagcatagctcatttcccaatatttttagtaatggtgaacataatcagcaccaaattcagtctgtaaatgatgacatttgttagcaaaatgctgacgaactctggctctttaagttccaagcagcagaattaaattgatatgtctcattaaacattttatgattctgttgcatcagtagtttcagaattctatgatgctgatgtacatctctaacactaattaaaatataatttccaaccttttaacattaatagaaaactagatgaattgaaaatgatttttaaaacaaatctgggacacgtgagaaggcccacgtgtcatgtctgttttgtggcccatcactggcaggagggaagcagtaggtcatctccttttaatgaaagatacttgtgaatgtgcaagtatgtgtgtgtgtccaaccagcttccctggccagtgtctttcattgcaaggacttttcttccctgtggctagaatttcaggaggatcatcctccccgtctatcatcagtctggtacttattcccaggcctggtgggagagcagcaaagcatctttaacacagacaggaccctacaagtgtaaatcgcactcaggaaaatgtgtgtgtttgggacaggcatctaagcgtttttacacgaattctacctcaaggtaacgaaataattgattataataaatgcaaaaggaatggtagaattagaatgtcacgatcttgcaatccctaatgaagtaacgaattgaggcagaaataattcgttaagaagagaacttcgtaacgggtggatgagactgataaaacgtgaaccagatactattgacaaacctaaatatatgtatcttctgccaggatgaatgtcctaggaagcaatggcgtgacttatgaaatatttttgccccttcctccaaaaaaaaaatgccacttggagctgaatctgacagagtctgtagatctaaccagctgcttaacagaaaatgccacagtggttaaaaaaaaatcccacagtggttagagaaaaatatttcatgacaccgggggatggaatcagcaaaattcagaatatggaaagttctacataaaaaatgactcagtttcagccataagtttgtggcatgaagaaacagatgaagaggattactctagaggaaaagatttaagtgacataccaaccaaatttaatctacagaccttaatccaaataaactaactaaaaagataatttttggacattgggaaaattagattaaagatggttcattagataataccaaggagctcttgttgatttgtattagctgcaataattatacacaaacacacttaaacacatacatacacacatatgtacatatgtatctatgtatactgtatatatgtctatttttaaaaagctacacgctaaaatatgtacaggtaaaataatatgattactagaatttacttgaaaatgctaaggcaaaaaataaggaaaaaagggatagataaagcaaatgtggcaaaatcttgataaccattaactctgagagtcatataagtagatattcattgtgctactctttctgcttttgagtttatctgaaaatatttataagaaaaattaactttgtcaaaagatataaaactgaaatacaaaatgaacacatacaaaatgtttccaattggatgtgaacattcagtaatgtaaagatataaattctacccaaattagtctatatgaccaatgtgaacccaaccaaacttctactcagaagttttggaactttgcatgctcattcaaaagcttatctggaaaaaacaatgtgaaagaaaacagccaggcagggcgtggtggctcatgcttgtaatcccagcactttgggaggctgaggcaggtggatcacttgaggtcagaagtttgagaccagcctggccaatacagtgaaaccccatctctactaaaaataaaaatataagccaggcatggtggtgtgtgcctgtaatcctagctactcgggaggctgaggcaggagaatcgcttgagcccaggaggccgagatagcactactgcactccaggctgggcaacagagctagaatctgtcccaaaaaaaaaaaaaaaaaaaaagagagagagagagagagaaaatagccaaaaactaatatgttgaaaaagaagaaagattgaaggacttgcccaaaggtaaattaaactttggaccccaatttatagtttcctgcatctatgccctttgccatgtaactagcagttcttccctctaaatgtggaatatcctctcttaactttaggcttattttggctaatggggtgttagcagaagcaatgttagcagaagcaagtaggggtctaaaatatgactgcgcagctgagcatgtgatcatacaaatctgctgttaccctgaggaaaatatgacccagcaagcccactggtcaaagaaggatgagaggcaccagagcagagggtctccggagctctcagggagagacggatcctctccagctgttcccaccggaagcagagctggctagtcaagcccagtctggatgagcccaatcccagccaagccccagatccctgagtaagtgcttattgttgtatgccactaagattttctggttctttttaatgtagcattagtgtgattatagctaactgaaacaaagctacacttaaaactgacattagcacagtaatggacaaatatatggaaggagctagatgtgtattaaatcttagtaaataataaagatggcccttaaaatcaataggtaaaaatagatctgatcaatacgtggtgttttgacagctggttatctatgtaagaaaaaaagtgtcagtaagatctctttatcctactatatacaaactgtatccatagatttaagaggcacatgtgtgtctctccctgacgatctttatttcacctgacatgttccagatataagcaggtagagaaacataacgttcaataaatatatgaaaaaatgctcaactccactaacaatcagagacataaaaaccaaattaaccatgaaataccaatgaaataccataattctcctaccatatcggcaaatattaaaacaaatgattaaccaccagtgccaatgagggtatgaagagatggatactctcatctactatggctgtagtgtaaaatactgcagccttttagaagggtaattaggcaatatctatgcaaatttaaaatgtgaattcactttgcccaatgctatttctagatgtctattctacagtaacatttgtacaaaatgtatgtgcaaccttcaaaatggcataacgtgctatagtaaaaatgggaaacaatccaaatagttgtaaacaaaacaccaaaacaacatgatatgaccataccaagcagccattaaaaagaagatgcaggtactgatatagaaaacgctccaagatatactgagtgagaaaatgaggtacagagcaacaggttgacacaatctcttttgtggttttaaaaaacctaaattctctaggtatatatatgccatcaatacataaaatgatagcaaagtatctgtaatgatatacacagttaaagttggttttccctggggattctctaggattggaagattggtgaaaaggaaagttttcttttagccatgtaaatgtacatgtgtgtttatttgaaaagaacaatatattcaattaattgccaattaaaaatgaaaagcactgaaaatactttaaatggatgacattacaacaaaatgttaattgttagtgtctctaatttgtagatctttgagctctttttatgcttttattattttttatttctataatgagacttttccatcagataaagttattttctaaaatgtgtttccatttaagtgaagctacccatttaaaaagagattaacaagtccaacttttgtgcattagtttttctttaagagcaatatagggttgtgctcttttttattatcagagtccttcaacacaacttttttctccttctttaagtctccctgaaccctttcctttccagcacagattgaattaaaccttgttcccttagtgccctatggaggcgggggtaacatttatcccactgtatggacattgccgtttaatgattatatttattgaataagtatgtgtttaagtatttacttcttaattttttttaagtagtagcatgtaaataagcattgttatactgcttatttatggccaggaactttctaagtgctttataacaagacacatgaactcatcaacactcataacatccttgtgaggaaagtagccccatttcactgatgaggaaactgaggcagagagaaacataacttttccaaggtcatgcagctagtgagttgtgaagctaggatttgaataagctgccttctaagtagtccatggctcttgggtccaaaggatcggatgactgcgtccccagcccccaacactgtgccttggaacacggtaggaaatcaatcaatgtgtactgaaagaatgagagatggggaagatgtctggagcttagagagtaaggaagaagtccaagaaaatgaaggatttacctttgggctttgcgttagtattgatgggaagtgataaatttaagtggcaaagcatgatagagaggagttctggagctccagactaggccaccctttcccttccaacacttgaattaaatctcacctcaaacaggcagacattatcatgaatccacagtatggcaaggaagtcaaatgggaaggctcgattttaattttaaatttatttatgattttaaaaagaagattgagggtggaaagcagtgctttatttcccgtttttattcagatctgtcactttaaaatatagttgtccaaagcaaggttaaaaaaaattgtatcacgatggaaactccaaaaaaactccctatgtttggaaggctaacaaaaatagaaaaatgtaatcatttgcccttggagatttttgctgttggctttttgatagtgttttcgtttgtttttaaatttttggttagcttcagagcggtggggtttcactaagtttcaggggaagctagttcttcacttagtaaaatggaaggctcgactaataggaaaaacaaactaacaaacaactcactattctagaaacccaacaatttggactggtagaaggtagacgtgtatgaggcttgtgtggaatgtgggagctggaaactatacttaactgaggactgaggggagaaataaggtctagacagctcccagagtaggagcggctgcaccttggaccaactgacaactctttgatcgtaggtgacctctggcagacaaccaccattacgataaaactctgagaaaaacagattacacatggcaccattggtgagtgtgacacagcacctccatccactgcccagagcaactctgtcaccagaacagaccttcaaaatgcctcgtaaataaccacccttgcaggctgactaacaatttacaagaggcatgtagtgaagaataatgacctcatttattttactgttcctctggtgggaatggaagggtagttaaaaaagaaaagagtgggccaagaaaatttggggtggatttcagtcaccctctgacattcccactgtcctcccgacccagagaaggtaaggatttataacaaacatgtaaaaacaaatgctgagcctactgattttagtatctgtataacctctttgtgagaaggaagatcattcatcattgcatgggctgatacattccttctgcttatttacatgctatttcaaagtcagagcaagttccatttccttggtcattaggctcaagtctggcaaagggagcccaggaattaaacaaaactatggtgctagaacagctaacctacatggtctctttcaacagtttaaaccagagtttggtgttgtttctaatcctttagaaggaataatggtttggcccttccaaaaggcaaaatgagtcaccatttagggaaggaaggaatttagagcgaggggattaggaatcacttacacttgcttccccctttatataaaagctgagcaccactaaaaagaggaaagattcatgctgggagtgtgtaatcactcttagagggagtggcttgatctgcagagcaaatgtgactccggactggtgtcaccatgatatgtttttccatcacaaagtacatcaaaaggggtggcagattctaacaggctgtgtgtgctgtggcataccaggagtaacttcctgtcggtggcaattgtgagcatattaaggaatggcatttttagagtctgagctttttattctggaaggatccaaacgcactgccttcctaaaatggtttcatatagccactccagagacgttgcttgcctatctagtaacactggaatggaatcaatctatgaagcacaagcaaatggttcctcaatagtcagttgagtttgcttctttccttttagccccttcagtataaagtagagtagttcgccaggactggtatcctcgaaataacaatgactaacaccgcttctcttggagacccttgagcctagaccagaatttgcaccctcaggctactgccattcatccatcaattcacagatattgatagtatatctcccacagtgctcacgacagcacaatcatccgtgcgtgcatagtacaacatagtttacattccttacaaacatgctgcattacagctcacaccagcttgagaaggttactggatttgtgctaatttgcctgttttgctggttaagggctttttagtgtactgagatatcttcagaagatagactattattcatgaagcaattctacaaagaaaatgtcagagcttctttacttagcacatatcctctaagggagcctgtgcccttgttggtatgctttaattttttttcccagagaaagctttcatttgatcttgtaaatatcaacctgaatttatttatttatttatgtatttatttattatggcagaaatttccacgttgattaggtcattacagaatcttctcggctggccatctattggttttttttcttttgttacacaatgccagatactgatggcttttgttttaaaaatataagtgcttaccttgacagagtcaggatgctccagggttagcctcagtttgtttcttaattttctataggactttgagaaatgcacgtaacatcacagaacctgctttctctcttgaaatctgagtctaataatcgtctccttgcctctcagaatggtgattatcagttcagttcagcaaacatttactgaacattgactcaattccaggcaccacgaaaggctgaatgagataaggattacaccttccaaacacacaatctagggagatactgactatgagcacactttgaagcatataagagactctacaaggaaggaattgtaaaccacatgaattggtgggtgaatgtgtctctgcattagacacttccaaccatgctctttctagaaacaccttgtaaagacctttgcacctcaatcctggggtcacctacatgccattgaaaagaaggtttactgtgagctctctgggatcctttctgattacagggccacactaaatgatcctcgcttggcataaaaagcataataagtctctaatgactcagatactaggaagaatgatgcatactattttatttaagaggaatattgagtaaataaaggttaaaatttttccataagctttattaaaacttcataaaaattcaattaaccaactatttgattactatcctatgcaaatactgttctgggtgctagccaaggtgcaaagctaagccactggccagtctctcctcgttccccaaataggtcggagtccccagttttgtgttcttcttgtgcactgacttattttagtactttttacaattgtaatcagttttttattaggagctcatttgtaaaatccttgctagaagctatacgaagattgtgtctgcctttttcactgccatagtcccagtacctaattcagtattgactttgaatttttctgaatgaatacataatactgtcgtactgtgcacaggtcattgtgttgtcatgggcatgggatgcgacatactatcaatatttgtggattgatggatgaatggctctagcctgagggcgtaaatgctggtctgggctcaagagtctccaagagaaggaatgtgggtcattgttactctgaggacaccagtcttggttacttactccattctgtatgaaaggggctaaaaagaccttatataaatacaaagcaaattggctaaggatgaatttaatgataaaatacaagcaggtcatatttatttatttgctgttaaaagcatccaagatattgggaacatattgatttcttcatattaaattaaattgatttatttgtttaaagaaaagtgaaaaaacacattgaataaaaaggaaatattagatgctaatttggtgtcagatgctaagagatagagaaatccacacacacatcacccacagacacactcctcccagcacaccagatatgtttttgacttttctcaagatggtaaggtctgagattacatttacaagttatctgtaatgacagggtgcggcgaacctagagtatttacttgggattattaaatcaacacagcaaacatttattaaacctcaagtgtgccagaggctaaggatatgaggtcgaatgaggtgagggaaaagcagtgatggagaatggaatgggggaacaacttatcaagaggagaaagatcccttaaaggtaactgatgcccaatcaaaaatactgctcactgcttctccagagtactaggcacagatatcagaaatctaaatctttcaggacccactatctggcactagtgctagactaccaaactggaacattctatatttaaatagtgaaatacattcaatagttcagagttcctgagtagttagaaaaacatgatgaattcataataactgcccgtctcactcctgctgcctttgtgggtacagttctctctaacacccaggagaagggtttcctcccagaatggacccgaagcccggttagcaccactaaactaaaaactaagcaagcaattattctccccgcatgcacccctgccttcactgatgtggcattgctattgatccccattaatgatttagtgattaaggaggataaattgcctatgaatgcaaagcaggctgaagggccctcaggagcacagctgagcattctcctatcaataagtgctgtgcatgctgctgtaattttcagcccagcatcctgtgccacctcgggccacaatcttgttcacctggctgtcttttgacaatttctggaaacagttttccttcttatcttctgctatctttttcacttgggcgacagtctcacccctctcttttgacctactttccagttaccaggccatagcgctgaatcctttgttatgcattaacacacacacaagcataaaactgcaggggactgctgggctacagtgtatgtgcttgtgtgtgtgttggggggagcggttcatcatatcatcccctttttgggttatgctttgcgtgctaggccgggaaaccacacaataagtggggagatgaactctttctctcacttcatttaaaaaaatggtgttcagggcccaaaagcatggttgttggaagagatcaagcaacaaaaataataaagctcactggatccctctgcattaaggaaggagaatttgctcctgggacagaatgggagagaaaagttcagagaataaaggagaacagtaggagagagagaaggggtggtaagggagagagactggaattaggttcagggtagagccagtgaaattttaagaagagtaaattataatctcctgaggttttttgtttgtttgttttgtttttgttttttgagatggagtctcactctgtggcccaggctggagtgcagtggtacgatctcggctcactgcaacctccgcctcccaggttcaagcagttctcctgcctcagcctcctgagtagctgagattacaggcacacaccaccatgcccagctaatttttgtatgtttagtagagatggggtttcaccatgttgatcaggctgatcttgaactcctgacctcatgatctgcctgccttggtctcccgaagtgctgggattacaggcgtgagccactgggcccggccctgcctcttgagttttaaagttattgcttattgtctttctttcttcttagagacaggctggcggggctgcctcgaactcctgggcccaagcaatcctcctgcctcagcttcccaagtagctgggaccgcaggctgctctgggggccatgcccagctttattgtttcgtgattattatgaaaccagtggtccgctaagtgttgaccccgaccagcagcaacagcatctcccaggaactggttagaaatgcaaattctcaggccaggcctcagacctactcaacctgagggtgctgcacagaagtggctgaacaagccctccaggtgattctgatgtgctccaagcgtggtgaccctccaggtgattctgatgtgctccaagcgtggtgaccctccaggtgattctgatgtgctccaagcgtggtgaccctccaggtgattctgatgtgctccaagcgtggtgaccctccaggtgattctgatgtgctccaagcgtggtgaccctccaggtgattctgatgtgctccaagcgtggtgaccctccaggtgattctgatgtgctccaagcgtggtgaccctccaggtgattctgatgtgctccaagcgtggtgaccctccaggtgattctgatgtgctccaagcgtggtgaccctccaggtgattctgatgtgctccaagcgtggtgaccctccaggtgattctgatgtgctccaagcgtggtgaccctccaggtgattctgatgtgctccaagcgtggtgaccctccaggtgattctgatgtgctccaagcgtgggtgaccctccaggtgattctgatgtgctccaagcgtggtgaccctccaggtgattctgatgtgctccaagcgtggtgaccctccaggtgattctgatgtgctccaagcgtggtgaccctccaggtgattctgatgtgctccaagcgtggtgaccctccaggtgattctgatgtgctccaagcgtggtgaccctccaggtgattctgatgtgctccaagcgtggtgaccctccaggtgattctgatgtgctccaagcgtggtgaccctccaggtgattctgatgtgctccaagcgtggtgaccctccaggtgattctgatgtgctccaagcgtggtgaccctccaggtgattctgatgtgctccaagcgtgctgaccctccaggtgattctgatgtgctccaagcgtggtgaccctccaggtgattctgatgtgctccaagcgtggtgaccctccaggtgattctgatgtgctccaagcgtggtgaccctccaggtgattctgatgtgctccaagcgtggtgaccctccaggtgattctgatgtgctccaagcgtggtgaccctccaggtgattctgatgtgctccaagcgtggtgaccctccaggtgattctgatgtgctccaagcgtggtgaccctccaggtgattctgatgtgctccaagcgtggtgaccctccaggtgattctgatgtgctccaagcgtggtgaccctccaggtgattctgatgtgctccaagcgtggtgaccctccaggtgattctgatgtgctccaagcgtggtgaccctccaggtgattctgatgtgctccaagcgtggtgaccctccaggtgattctgatgtgctccaagcgtggtgaccctccaggtgattctgatgtgctccaagcgtggtgaccctccaggtgattctgatgtgctccaagcgtggtgaccctccaggtgattctgatgtgctccaagcgtggtgaccacagagtgcatccttcctgctctcaccctccatcccaaactgcagttaaggtctgggcattcacagatgttgtgtgtggctgcttttnnnnnnnnnnnnnnnnnnnncagtggtccgctaagtgttgaccccgaccagcagcaacagcatctcccaggaactggttagaaatgcaaattctcaggccaggcctcagacctactcaacctgagggtgctgcacagaagtggctgaacaagccctccaggtgattctgatgtgctccaagcgtggtgaccctccaggtgattctgatgtgctccaagcgtggtgaccctccaggtgattctgatgtgctccaagcgtggtgaccctccaggtgattctgatgtgctccaagcgtggtgaccctccaggtgattctgatgtgctccaagcgtggtgaccctccaggtgattctgatgtgctccaagcgtggtgaccctccaggtgattctgatgtgctccaagcgtggtgaccctccaggtgattctgatgtgctccaagcgtggtgaccctccaggtgattctgatgtgctccaagcgtggtgaccctccaggtgattctgatgtgctccaagcgtggtgaccctccaggtgattctgatgtgctccaagcgtggtgaccctccaggtgattctgatgtgctccaagcgtggtgaccctccaggtgattctgatgtgctccaagcgtggtgaccctccaggtgattctgatgtgctccaagcgtggtgaccacagagtgcatccttcctgctctcaccctccatcccaaactgcagttaaggtctgggcattcacagatgttgtgtgtggctgcttttgttgttgttgccaacattgaaattgaaggtgacggtcaagtttctcacttgcagcagcacaagtgtgagtaggactcctagaggcagaggcagccatgaagtcagaaatccctaaagaatttgcagagatgtttgggcctccacaggccaagtaatgaagaagattgtgctagtttgccctgtgttctggaagcagggagcaccctcccggcatgtccctgtaataagttcaccttctaccctccagatgactagctcacatcttccctatcaagcgtttcatgcccttccttgctgctgcttctcaacacatgactttgctttacacttcactgacaaaaaaaaaaaaaaaggagtcacaaaatggcaatcacctcattcttcttccattaaactggaaaatctgcacccctcttcttctactctactcctgtctctggagagagtagatagccccacccatcacaggcccttcttcacctgttccctggattccaaccactcaaggatttcactcctgaaacttctcaaccttagctccaagaatcacctgcagaactttaaaaaaccccaaagcccaggctgcagtccagagcaattacatcagaatgcctgcatgggggactgaagcatccatagtttcaaagcttcccagatgattgcaacgtgcagccaaggctgtgaaccaccgtcctctctctggactgcaaactctctttcctggttcctctccgtcaccataaaataacacccactctctcttgtctttaaaaaattctcctttgaccttcgcttcaacatctaggtgctacagaaagtcttgagaaaggtgccatctcccgccgtctctactttctcgcctcctgtttacaacacagcccatgaccatctccctggcttctgtctctatcactttagtgaaaccgtccttttcaagatcatcgaagacatccatatttccacactatatggccactttcctcccctatcctattcaactaatcatagcattaaacagagttgactgctgtcttgaatctatcaatgtgtctggctctgggctcttttgatctccttgcgctccactgactgctcctgctcagcctcctttgttgacttctcctttgtctcaactcttaattgttaatgaccctgaatcatttgtgtccgttattgctcctaaccgtgcccatgtttacatgtctagctcagccatctcctttgagttctagattcactttattcaagtgcttacttgacgttttcatttgcatgtctcatagacatcaccaaattaacatttctgaatgtaactcttagcttcacccccagtgcttcccctccacttcccacagttttcccagctctgaaaatggcaccgccatcaacccaattggtctaacaagaaatctagagttattcttgagtcctcccatttctttacttctcatcttgaatccctgtgcaatttttgttctaaatacaaaatagatctccaatctaaccccttctcatctccactggtaccaccatgtttagtttatcatcatctttgtcctagaccacagcttccaaattggtctctggtttttgtcccaccttcctccaatcctttccatgaactgaaaacctaggggaggtccctgtacagcctctagaacaagaacgcctccagacctaagtgactttttcagaacagaggtatctggaagctgctcatcatggatacaactgaagatcaaggcagcaattagaaggttattagattgtccacctcctgagtagttatcctgaaagttaatatgtcaagcaacttaactaacccttttcccgtcaagaagagtggtcacataagttgaaatgaatgcagacacatatcccatttacacacatgatataatccagaaaagttgcaaacaaaccaaagtctgggtaaattatagcattcctgaaatttcctagagttctgaacagttatatgtagcctaggattttctttttgtaataaaaagaaagtcaataacaaactcttgattgataagtatgaatttttaaatacaattttcttagaataggttgcttcctacatactcttccatctcattctcttttgctgactccttctctactggactcctaaatgatggtgttcctgaaggctagatactatatcctatttccttctttatctatattttctccctaggtacagataactcccaaatatatatctctgattttcttctccagattcacatacctatttgtcatttctgctgtctatctatggttatctccaacttaacatattcaaaatcttaatttatatatctgtaactctgatcctctcagtatttttcatctctgtaaatatcaccccatcaaccagttgcaaatgcctcacatctggttttaagattactatcaagagttcattttttgaactgcacatggcccagttaacatttcctgttaccatttaccttgaatatctgtctcatagataggagtgttgggtacaatatgatgaggatggatgtatagggagtgtaggaatagcttggcgccttttgccaacactagtggaacaggtaattcccaagccatgctgggcatggtggttcatgactgtaatcccaacactttgggaggctcaggcaggagcactgcttgagcccaagagttcgagaccagcctggacaacatagtgacaccacgtctctacaaaaagtaaataaatataaatataaaacaaagaaaagatcagtaggaccaaggtgtatgttctagatgagtagcaaatattgttgtgcacttatctatatctaggacagattaaccctgattcaaatgtgactttcacatacaaggatcattcaaaatcagcaataatatgggctcattttggatgatgttagagagcagtgcatatggggtagggtgccatgggaagtctcctgccccatgtgagctttcatatctttcactgccttatttcctaggacctagaagtggtctctcccacattgatgctgctgcaacatctgcatctgcctctggaacttaaaacagcttcgtacaaagtgtgggagcaggggagaggtatgaaagggcagagatgaagatgaggagaaaatgctatgtgtgactgaggcacaaaacagaattgatagagaaatcattgaacttgactgagttttatttgaatataactagattaagcttctgccgcagacagaaaggaagactgaaaatagcactagagatcaagttatattatattaaagtacagctacatctttgcacatccagagttatggtttgcaaaatttgcacccactatgcacataaacaactttgtggaatcctttagatatacagactttctgttcttaaagtagggggatagagaggttagttctactatgaacagcgtcgactttattttatttttctgaagtcagagttatagactctaatagttttgataatcaagcttaataagcccaatttgtttacagagtaatagtgtacagaggttatactgtcaacatatattaggttggtgaggttggtgcaaaagtaattgtgatttttgcaattacttttaattacaaaactgcaattaatagctccacaaataactaactgcaactttagacaatctccaattaatcccgaaataaatgtatagcagcattgacttcacatatagaggttttatcttcatacacatggaggatgaattttctatctttctctttcaatcattaaagatggtatatgtaggagaggcatatgtatttagaataatcttactaccccttcaaaaagagatgtattggaaatacatgagcttgttttttttcttttttcaaagacggagtcttgctctgttgcccaggctggagtacagtggcacaatcattgctcactgtaacctccaactcccgaactcaagcaattctcccacttcagcctcccaagtagctgggagtacaggtgtgcaccaccacacccatctaatttttaatttttattttttagagactaggtctcaaactcctggcctcaagcgatcctcccatcttggcctcccaaagagctgggagtataggcatgtgccatggcaccccgccaaataggtgaatttttaaatgagaaaactaaatgtctgcctcttaccttcacaccaaggattgaagagaatgtacgtgtctgtttctgggtttcgactggttcgaagtacgccatagggagtccagacagcaacatacatgcggaatttccccacaatacatttgggggaagactggatggacagccgcacagacctgtcctctctcatgacaatcttggccccccactttccactttgtaactctgagactataggcactgggatgtaggttcccttgttctcctgtgggtagcgacctatgagaagagagaagaaatactctgttaggttgatttcacaagccatttttgttctcactctgttatcttatagctgaagggacaggagtaatccattagaattattcttgacttgaagaaacatacaaatcaggcaagtctgcaaattactttgattgtaagcaggagaaccttcaagagcaaaacttattcacttcatttgttttctataaagcatgtagaggattccacattaagacaagcaaacagtgctccattgtaacctccctaattactaatttcaaagatctttaaaagagtctttggtaggcatattgtcagagagagaacattctaaggaggtggttacataagttactgctgtgcaattctgtgaggatgcttaatcttaatgaaaataataatttacacagtgcaaaccactgagaaagattagaacttcaacactttgctattagggatataggttataccactcagaatgaatatcacatatacttgtaaatccagcacaaatttaaacattgttttctgcctaggtgccatggcatctaagtaatgctcttgaagactcatgggactcaccctctcaggagcccctccataaacccacctgcataagcatgtttgttccagaggcacccatctcctgtttctgctccctcttcgtgcatactcaatcttgggatgagcttgccctttttaccagaggctttgtttttctctggaacccctttcactgttgacgtgtagacatcaaaggcaatcttgccaggtaaatgggacccataattcatttattacagtggttcccagcagctgttgtcactaaatactgatttagattcagaatacgtcgtatttaaaaagatgcaagtttagtaaaaataaacttagagataaaaatctacgtgttaatgatagatttaaaaaaaaataagggatgaaaggaattttaaagctaattatgtaaggatgcactttggggaatagcaaaaaactagagaagtacatctgaaagcactctttgtacctgttatgtgctcaacctcagcttcacctttgtgctaacttccacttttgttttaaaagcttcacctttgtactaacttctacttttgttgggaacatggaaagaatgaagacaatcactagtttccactgttacactttaaattaagacttcaaagactcatattgaatttcacctatcaaatccaagttatacaaaaatagtaaagcaaaaggaaagctatgctttttcatgctgactttgaatccagtcataacctaatttaaagactacttctgacatttttcattcatatattgatattgcctactatgtgctagacattatcctaagtgctaaggatacaacagtgaagaaaacagacaataacttctgtgctcatagagctgatattccacagaaaaagccaaagcatgtggcttaccatgttcttattacccctttattccctataacaaaagatgagaaggaaaccattatcatcatcctaatttgacaaatcaggaaactaagagtcattaagcaacttacctagggtgatacaactagcaaatagtggagttcagatttgaacccagaccatctggtttgagagtcggcctgttctaagctctatggcagctgtgtgagttgaaaatgttttggagttgatgagaaccatgtcaaattctgactccactattaactactggtgcaacttcaggcaaatcacttacttgtcttagcttccattttcttgattctttgcagtttagtttgggaaataaaaagacaatagattttataatataatgaaagctttatgcttagcacacagtaggggctggctgagggggcactcattttttttttttttttttgagaaggactttcactcttgccacccaggctggagtgcagtggcatagtctcagctcactgcaacctctgcctcctgggttcaagcaattttcctgcctcagcctcccaagtagctgggattacaggcacccaccaccatgcctggctaactttttgtatttttagtagagacaagtttttgccatgtagggcaggctggtctcaaactcctgacctcaggtgttcccccccgcctcagcctcccaaagtactgggattacaggtgtgagccaccatgcctggcaaattgttttttttttttaagtataacttctactagaaagtaaaggcagaaggaagaaggggtgatttcttttttgctctctggttctgaatctgaagaaaggtgaatgtcccaaggaaagtacgttacttgtgttgattgagatattgtggctaaggggaaagcaattcagctggctctaacacttctgtgtgatctcgggcaaagcactcatcccctgtcaactaaaactttgcttcttctacaaaatggagatcatggtggtcatagtttgtgatggggagggcagcttaataattggtagttatcattacttccctgttgtcctgggctttctgattcctctaagtgatccttctctgctccatctgtgggaaattaggatgggtttaccaattgccaacaaacctatcaaagcccaaatctatttcaaaggccaattcatcccaaactaaaaaaccttgagctgactgatttttccatcaggagaacttgtagaagtaaaaaaagaaaaaaaaaagggttgccatttattagtaaccaaaagccttaataattccagaatcatcatggagtcacctgaaacctcccattcaatcataatttctgattttctgagttgttaatgatcaatgtaatctccattcatcctttagagcaatggttagaaaactatagtctgcgggccaaatgtagcttacctactgtttttttttttgtttgttttattttgttttgttttgagatggagtcttgcactgttgcccaggctggagtgcagtggtgcaatcttggctcactgcaagctctgcctcctgggttcatgccattctcctgcctcagcctccctagtagctgggattacaggcgcccaccatcacgcccggctaatttttgtatttttagtagagacggggtttcaccttgttagccaggatggtcttgatctcctgacctcatgatctgcccgcctaggcctcccaaagtgctgggattacaggcatgagccactgcgcccagcctacctactgtttatataaagtttaattggaacacagttatgttgatttgcttgtgtattattgtgctacaatacaaccctactcttgtaagagcagagttgagtagttgtgacagagtccctatggtctgcaacgcctaacacagtagctggcccttacagtaaacaattgccaacatctgccttagaggatttcacattttatttatttaaggagcgatttattacagactcttgaagtctaacacttgagcctaagaagaaaataccatcacctagcttctccttccaaggagaaatatgtttctaaactattcgcaaacatctgtactactagtaggtcaacctttagtttccttaaagtcgcctaaattccccacagtctcagggggtgttgaaaacataggaagtttgtagctttttattgattttatgattcatggctaaaatattcaattttaagattgcaaaagttgtttagagttgccaaggcagttcacatagtgatgcaaataaagtgacaggaaataagttttatttcttggggtccttacaaaacctctgtgaggaaatttttacagatgggaaactgaggcttggtgagggcgtcatgtgtgcacatcacatagctaggcagaagtggagacagaactggggacagggaagcctgttctctttgctccatgtcatgcttcctctgtggaggaaggtggagaatggcaaaagggatctagggagatgaaaggagacaagagaagaataaaactggaaagtccaaaggaatatgaggaaaagggacattgagaaaatatgctgccgtggataagagttgtgtgagccagaaatgtggatcaaaggaggtaacaactgagtgagtgaagagaaggaagaccaggtggagagaacctgcatgagggtctctctgggccaactcatttttttgtgatttgcattgggaagacttccaaagtaatgtcagacaccaaagggtgaaggctgagcaatcctgctgatacgctgatgccacgtggcccgggaacaggttatggaagcgttatcagggacagggagtggtgagattaattccaaaggaaggaaaaagaatcctgattggcaggcttttcatattcctgtatgggaaagctggttaggaatgtggaacctgatgtgccaatagaacctcagggactgctctattacacccatgtttaattctgaatgtaatgatttcagtgacagcactggggaagtactctccatgattgaattgtgagtgaggaagttgtgacagagtagtatttcatttcactaaatagcccttctcagccccaggagtcggcatggttacgagaccacaatccagctaccctgggaaaacccatccatcaacatccatgactgcccatcagctatccttggcccaatctggatggaaaacatggctccatacagggaacctccatgcacgtgtttgcctagagtatataatgcctggatagatgtgtttttctcccccaaatcatgcaactttgcgttaaaaacatcagggcaagaaaaagacatcgggaaagacagcatccaagaaaggaatcccgttttgtttttaataattgcagcctttgaaattggactactaaacatgaggaaatattataattaccaattgcattttttcacacttatcaaaaactagtgccatcttcccaagtgatctagaaattaacatatgctcttagtttcagtgcttgcttccatttgtgaattattattgaggccacaaaactaatgtttttaaggcaaaagccgcttggaccatatgcctatattcgaatgtctcattgtccctttactgagggcctcactctccttacacagacctaccttaatccccccagctgggatgtaggaggaagaagatgaaaatctttaattccatttgtgatgttactcttttccaaccttagctacctaggcttgattgagctttgtgcacagtttcttgatattagtattcttcacaagataggaaagagaaatctagccacagctcaaattcagtgctatgtgaccctggggaaaatgtcctctcaacctttcaatgcattccacagaccagagagcccactgcacgcaaagccctgcattggtagtgcccactagaagaattcattgccttttaaaaaattaatcttttgggttagttgatggctttgaaatatttttacattaaaaatacaatgtcctaggtggtgattaggttcccaggtagtctagaaaggacatcaaatagcacatggtatggtcagtatggttgaatattgttcctaatagaactgttctgactccacctctctcatgcctaggacctggaagaacatacttgccatcaaggagggttggtatcagtgactgagtagacacatctatcaatcactgctccctctcgtgctccaaaataaagaagctgataactcaggacactcccacttctctcctcttttgggcatgtcatctgtaagtccagtggctgcagtctgtgcccctcatatgctatacttagtaataagaagacttctggccatatcgttagggaaacgaacgtaggagagccagggtcacaacctttttaaatcaactgcatctgaaaactagcaaggcactttccttgccagtcaaaacccatggtcctaagatgttgacagctaaggaaacaacttagtaatgcctgcaaggacaaactcctacaacaacagaaagtccagatgtcccaatacccataatgatatatactttcaagagaattacagttatgctttgatatactcacacactaaaatgtcaaggatagttttctttaaatcaatagaataataaattttgtcatgctgtcatcctacccacacaaaagcacagctttgtttagtctttacatagacaagactcctatgtaagaaaagcttaaaacaatgacagcgcattcctccacttgctttctgaggataccctactttgtaatggagcagcttttaataaactatctcttctcactgctctctgtgactcaccctgaattccttcctgcatgagatccaagaacactctcttggggtctgcatcgagaccccttttcctataacaattatttgccagaaaagcccaaacaaacatttttctccttattcacttagatatctattccgcttgttaaactgaactgaagacattgtctaatatgtctgtatagctcccatagaatgtcacagtgttttgtacccagtcggtacctaataaatgtcagtgaggctgaactgagctctctgcaaatggcaagccccactaagatcatcatagagatgttagaagctctggaatgagatgcccacagcaatctgggtgttcaatccaagcacccctcacaagaaagaaacttttttatttctaagcttcttcctcagagggtgttttccattcttatataaacacattttaagctgagccctgactccatctacctgcagacttcccttaagagttcattcttataagaggactgtctctaaggaacacaggaatctatcatgtcttcagctgagaaggtaaatttcatgatgttaattcatttttccatttgattcatttgtttttcccaaggcgcacctttcatgttcaaaataatcaatctatttccaaatgggcccttgaagtatgaaggtaacagcatgatgtatgtggcagcgctggaagtgtgaatacagttgctttggaaaaggaagcaaaacttgtgctaacagtcttaggatggaaagggagtgtgctgagaccaagtgggaataagtcaccaaataactcttagaaataccaggttaccagctacaaaaacaaaatgccaccaccaaaaaagaaacaatcaaaaaggcacagaaatcatggatgatagcaactaagaggagagaaacacaagtattcaaaagcaaatcatctctttgaggactgtagaaatccgccctttccattgctaagttgccattggcagattacatacatatttccagatgtttcctaaagaaaagagaccttcctggccatgtttattctagctcaggcaaacttaggaagggttggggggaaactttgtgaagacagagatggagttttgtttaactttgtatacccagcagcttgcatgatgtttggaacgtagtaggtgctcaataaatatttggcaaatggaagctaggtacttgttaaggtgtcttttctaccttgattttattttacttttctttcagtgcttcctacatcacttaaagcctcttttggagtaaatgtaaggcgtaattttgtgggatatacatgaaaccagcatcgtgctaggttttttgagtgaatcagaaagaaatcataaggctgtcacctgatgctgactacctggtccctggctttaagaagtgcaccacttagatggctaaccaaggcaggaatgtgaacatgaggacaccctgtctcaggatgatgccagtggcattcacaggaagtaagaacataacatgaacttcagagaaaatacgaacagcattgagataggagaatttctccctaagaatggcttatttctgagaaagaggactgtgaagccccttcagtgaaatgtgcatgcattttaaacattcctacagcatgccagcctcttcctgggactactggtcacgaggaacacagtgtggaaacccagaggaggaagtggctaacagtgtctgtggaagttgaagaagattcctcagagaatgtggttttgggatacaatcttaaaggtggaaaaggtagagaaaagtcttcccagctgggggagtaaccaactgagggaataaggaaaggatggtgcataaagggaatggcaggaaactcaggatacctgtggcagaagaagcatttgacccagggagggtaaaaagcaaagggacctccaacgctgtgcaaaggtatgtagagtgtgtcctagggaggggatggagatggggcaggagccattgaaaagcttaagtgatctggtgagattacattttagaaagatcagtctgtctgcaagatggaaaatggtttgagagggacaagagtggagcaaggaaaccagtcagagggtgctgaagtgctcaagggaggcatgatggtgtctttgactgactctcgggggaaggtaagtggaggggtgccagcggaagcaggaagtagacgcaacaggtatttgatgttggcattaagtaggggggcagagccataggcgaccccaggttttgttcattcttgaaagagtttttcagtgcctacaaggtgccaggcaccattttttttattttttttgtttgttttgttttgtttggagacggagtcttgctctgttgcccaggctggagtgcaggggtgccatctcagctcattgtaacctccaccttccaggttcaagcgattctcctgcctcagcctcccaagtagctgggactactggtgtgggccaccacacccactaatttttgtacttttagtagatagggaattttgccatgttagccaggctggtcttgaactcctgacctcaagagatccacccgccttggcctcccaatgtgctgggattacaggcgtgagccactgtgcctggccctaggcactgttttaagtgagatacagccatgaaccaaacagtcattccctctaacccaaagattccagactaagcttcaagcatgggagaacatgctgctttatgaggagtttgctccaaaagttaggacctggtgttgttaactgcgatacaaatttactccaggaagctagttttctagaaattccctaacccacatgtgtgttgcctcatttaagagaagacaggatatttttagtctttaagaaaaaataaccagcagaaaatgttctacaatgtagacaaagttggttacagagcataacattacactgcagatttgttcacgttgcccattcaattccgaaggaccaggaggaacaggagtcaaagaatctggacttgtgtttcctgttgtccattcgggaataacaaccacttatagtttgtctcagcaactccacctattgacagactggctgttctcagacctattgcctgcacccctagaatcttctgtcaggttccacaggaagccatgttcccacgctcctctgctctctgacttcgaggtaggttcggccaaagagaggattggaagcaggaggaggggagatgtcagggtgtgtctcctgtgctctctctgtcttgaggtgagagtctgagtctcctccatggctccagcacctgctgatgccttctgggttctgatgggacctcctcctccatgtgcctccagctcctggtgtggtggcagttttctactgttcctaattcctgggttgcctcaccatgtcgtttgtttggcttcttagtcattcactcgcttgtgtacccaattgcctccagtaagctcccactgcttacaaatctagagcagtttctatttgctctatcacctttaagggttatgtccattttatatatgggaaaactgaggctcaggtaacttaagtaactagctctaggctacatagctatcaggatgcagaacaatcatttgaacccaggtcggcttggtccagagctgtgactggggaggctaatgaaccctctcagtgcattttccatctgtaaaattggcattccagaagatgaggattaaacaatagtgtgtgtgaagggcatttcataaactgaacaaattattattctccgtattatatggtgtctgatggctataatagcaaagaaatcttactaaacttattttatttttatttctgagcataaccacacaggtagtgaataaggtgtgagaactaaaagtaaaatcttatccccaccccactcccaaccaactgtacagactctttcttggctaaggggaccccagagaaaccttaaaaactgagccgcagccatgatgggatgggaggtggtacacacctcactatattccctttccttttgctgtttagacaaaattgaacagaatcaatgttaaaatagagatcataagactgacactgtggcaataaaatatataattataaacaagacccaaggccacaccaggcaaggattaagtcatgaacccctgcatttaaagaataaactatgttctaactgccacaaagtttttctttttgtctagcagctaaacaagccctggtctcaagatgagcaatgttggaacaactacagttcatccatcaccagatgctgactaactaactcacattccaccagccacaactacagttttgattgcgtaagagactgatttcagcatctttctcctggtaagagactatcaaccatggactggttctggacgatttaccgaagctgcacactacaatgcattcctgtccctgcttcaccttttgatgtatagggcctaactgaagcacatataaatgttaagtctcaccccaaagcgaacatgggtcacacataacatgcatgtttattcagtatgcatacattaagaccctcttcataaatgttcatagctcctcctgtaacctgtggaatatgtatatttggccaaccagctcagcataaattcctgttccatcttcctttcccttgaagtgcccacctttcagcctctgccagaggctgtgcttctcagcctgtccggatagtcactctgcaggctgtaaccttttataagaaataaagactcctttccaaatgtatagatttgtgatttttcaattaacaagtaattgttgctgtggcacgattcaggatctttttcgtcaacaggttatttattaagcaccatttaagtgccaggcactgttctaggtactgagaatacagcagtgtcaacacataaagattaatggagtgtatagtctagtgggagtatacggacaataaacaaataaatacatgatacgtcaaacggagacaagtgctatgaaaaaatgactagagcagcttaagaggacagagagggtcagagctgggggtgctattttagagacagtggccagaggagacatttgagaagagacttgagaaaagtgagggaatgagcagtgcaaatatcaggggacaggtgtcatcagtgcaaagaccctgtgggaggtggtacttggcatgcttgaggaggccaatgtgcctgaagcagagaaactgtgggaggtgaggtatctgagcaggggaattgggggaggtatgatgcctggggcagagggaattgtgggagattaggtgcctgagcagagggaactgtgggagataagatgcctgggacagagggaattgtgggagatgaggtgcctgaacagagggaattgggggagattagacgcctggagcagagggaattgtgggaggtgacagtgcctgagcaggggaattgtgggagacgagaaagttcctggagcaggggaaaccatggaagatgatgtcagagacagccagatcaagcagggctttgtaggactttggatcttattctgattgagaaaagcagtcactagaaaagaggcatggtctgctttaagttcttttaaaaaatcactttggttgttctgtgaagactgcaggagagcaatcaggattgctatgaagatctcttgacctctcaatattccccctttgcttgttggtaatgaaaatcctaccaacagaagagaaattagagatgatgctgaaatgtttatatccctgggaaaggcaatgtgtttgcttaaatttactgcactatgtacctttcctaaaagctggaactgggtgttggaaatagggaggaaagtggaggttggaaatagggaaacttgctcaggggacatggtataaaaaatgtggccaccagaagcacaaagttcatctacatgaccattgtttctagggcagtttccagcccttccttggcatgagtttaaacaagactgtgttattctatcaatccatgaaggctaaactctttaagatctagagatgtgagacagagaaataggatgttggtgtcacaatgtctaatttattgtagtttgccagatttcacagttataaaccaaactgcatacccagctttttgccccatctgaccccaactgttatgcaattctttcaactgacaaagaatgtttccatatttcttgggtttctgacccctcgtgctggggtctggaagcccaaggggtggagagggacttggtggggaggcacactttgcactgaacatgaaggtcactgaccagatgcactgcatttagcatcttcgagacccatctctttcatgttctcagtcagctcagaacacatgccgtaaagaatctcctacagcaactgaatttcccccagcaaatggcaagtctatggagccaaagcaccatttgctcatttgcttgtgttccatccattatatgagcagaatgagccttctaggttttacaagaaaggctcatttcgttaaaatcatggcaactgacttaaaaaataaagtgtcattagccaacaaaggaaaaagtttagctgaatgtcttccaaacaaaacaggccaactgatgacatttttgctaaaacagtcaattcctgttaataattgaatggcaacaataatgagaataaatcactggtaattctgataaagcatttgtttgtctttggagtatatatgaatgcaatatataaaagcaagtgttaaatgagtttgcattgccagagattaaagcaattactggagaaacaaaaatcaacatagaaaacattctaaggagtatggtacagtccatctagtattaacctacaagtggatatttacaatacatactcaataaacatttatttaaacagatgtttactagtgcttatgatgagcagagtgataccacttaatctggaggagacagggtggtgaatgtgctgagatatgatacatttcctgtgctcaatgggtttataattaaatacgcaagtttagactgtaatttaattcataatactaatgccacatgagaataacagagcaagagtagtagaccgtgggggaagtcaacgactttattaactacatgacaacaaatatggaactcaaaggactggcagaaagaatgacacacatttgcattttgtttattcatatgtatatttatgtgtggatgtttatttgcttactatagatgttcattgttccttcataagttgattaccgcttatatttaaaagcatcacttttaaaaaactgtattcaagcctagttttttgcaagtgacatagataaacaatacaggagaccacggatgtagctgaaacacagggatgtaaagaaaccgtattgaggttggaccatccttgcctaatgatgccttgtgggggaacacaattgttcttgacatctttttaaggccttagaatatattccaatcttctctcatttcctctggtcatgtgttccccactgatttgcctttaataaaggtcactgctgagtacctctttatttgtgggcttgaaggggtacaatattgccttccgtaaataacacctaattccagtgctttggaaagtggcacagtggaatttcttctaaaacatctgccactacttaaattccagagtgctttaagcatgtaccctggagtttcatactgtttgcggagtggctggagaatcctcactttgggactcagctgggccagccttccctggcagcacctagtcattgaacatcgcatggctccccatgaaaacggtcatttggcaactcgttctaagggaactggtctcagctaacagttaatggcaagagtctaataaattcattttgctaaaatgttaatgtctaagaagagtgctaatacttcttcttacctccatatttacactttgtagaaaataattccttcatatcttaaatgaataaattgccataatagaatttcactcattgcataaaattgggagagggcatgctctttacttcacattctgaagaccttgtcttcttcctcaggggattttacagtctcaatgtaatttcttctaagacctttccagatcccaggcccagtgtcagaccaggtataccaggaccagccatcggatcctgattattctggaccatttagagccagaataatcaggatctgaattccactgattcctccctaagggacgacactaggtaggaggagctcagttaagatgtcattacaccttttatatatcattataccttatatcaaaataataaatgtttgttgttttaagccactaagattatgatattttgttacaacagcaacataaaactaatgcaaacacagagcacactgttggcacattgtgaagactcagtaaatgacaagctcaaagataaaaaatgtatggaggacggccgggctcggtggctcacgcctgtaatcctagcaccttgggaggccaaggcaggcagatcacgaggtcaggagatcgagaccatcctggcgaacttggtgaaaccccgcctctactaaaaatacaataaattagccaggcctggtggcgggcgcctgtagtccccagctacccaggaggctgaggcaggaaaatggtatgaacccgggaggcagagcttgcagtgagccgagatcatgccactgcactccagcctgggcgacagagtgagactccgtctcaaaaaaaaaaaaaaaaaaaaaaatgtatggaggacaagagtcatgaatcaggggtcaccataggtatgacagagaggtgaaaagaatggtaagtgagatatacctaggttgaattgggaaatactgaaaggaggtaaaatactaatgagcacacctaggatctagaccttggtttctaaatactactttctattaaaatgaagtggagttctttggagaaatgtttctccttagataaatggttattttgagggtaggtgcagggaaaactcaaaacgggcctgaaacatcttactgtaacagactatgaggaagtaaggatactgaaactagttggaacagtccaactggcaaaatcgaggctgtttgaacattaagttatttaatgataataaaagatttaagtaacctatttaattaaaagagaaaatcaggattcatccaggtattaatcaatcattctatcaataataattttggtaataaatgggattttatagtctcaagataatttcctataaagtacttattaactataaaaggaacaaagaataactttgcaggggtaaccccaacagtcacctctgtgttgggctctgtgatgttctgcccaagacaccttcggaaatgaccgacaggcttatcctcagctgctgggagtgatgacagaaaatagtccttggtggttcaggcctccttgggagttgccttagcagaagaaaactgcctcatccagggtcacacctcattccaggggtggctcacatccagtgactgatcactatggaggaacaaagccccatccctttgtcctcatctcaggagcactatgaagagctatctcagctccagagtttcacagagggtcatctgaggcctttggtgtgagtgcattgcagcctgactcccccactacctaatactgcttccttccacaggagttgatcccaacagcactccctaatcaacagcttgcatgctaatttcacagtctacttcctgggcactcaacctgtgccaccaccttaatcgagtggttaagttaacatcatcagtaatgggatctgtaaaagttatgtgcaaccaggtaggaggcaccaagaagaacacagcatcatttctgcaatcttcctgtgaaagatacgtgacttgattttaacatcaagtgaggaaacatcagtcaaacccaaatggaggggcattctaaaaattactgccttgtaatgttcaaaagtgtcaaatcatgaaagtcaaagcaagattatgaatctgttccaaattaaagaaaactaaagacatgagacatgacatctaaatataacatgtgatcctggactagcttctgttgctataaggtacattactgaacaagtagaaaaactcaaatgtgttctaaagattagactaccatcaaatatcagtgttaatttccttattttgatggttgcacagaagaatgtctttgctcataggtagtacacactaaagtattcagggatgacgagacatcagattgacaactctaataacggttctgggaaaaaacagttctttgtatggtttgtcttgtaaattttctgtaaagtggagtttgtttcgaaatttaaaaaaaacttttaaacaacaacaatacatgtacccaatttttgtacaattatcctgtatattcatgtccttccttttttttttccatcagcgatgtaggtttttaagtttcttaagagaaacatttttgaacgaactttgtgtggagcaccaatcttgattcttcaaagttacatgctaagggataccctcctggttgccctacccttggcaacatcctatctctaacaaaagacacaaggtggcctttcccctcaagaagcatcagctgtaagagaagatagaactaactgctgaggagcagaacagcagtgaggtgttccacccattgcataacaatgcaaataaatccagaggctggagaaatcaactcgcaaggggttacttagtgaatcactgaagcaaggatgattgagtaccacaaggccaggtttaccaacccatataaatctaagggaaaagaggcagagagcaaaaagagatttgtttctaacttccaaatatgattaccttatgcatgcgccttcagtaattaggactgtgattttttttcctgaaattttgtcttgatggctataaacacaagcactgtctttatgaatcatctttatttttaaaatttggctaacactccactcaaatgtctttgacatgtttaaagcaatttgtttcacaaatatgaaagttagaaaaggttgaaatgatggaaatgatggaagtgaagtaatggagagagtgtgtcattttctatcacttagaaatatgttgcacaaatagaaaagctgtttgatggaaaatgccactgcagctgtctccactacttcatttccgtcattttagtcacagaaacataagggtttcttcctctttttgtaaaattaattgctttaatacaaaaggcccctgtccaccctgggcactaaccaagcaataacagcagactgattgcatgaggggagcacattcctcatgggcctgcctgatgggcctttcctgccgctgcaagcttcttacaactccagagccttgaaactgagtggtgtccaaactccaaatgcagccagacacttgattcagggaaatatttccttctcactagaagcttgtttgcatcagcagaacaataagctcctggactaccaagaatgccgtcctccttgcatggagggtacatacttcgtagccctcttggaatgctcccagttcctcaagagtcatctcaagacctccctgcccttttctgagattttacccttcaactctagctgatcctcttgctcttgactgcccagagtcacttcggccagtcgtgtcacacatttctggaaggcaactgtatcagtatagctcaattatatactctctgactgtgttcattgtttgtggaattcctctcactccaactacagtaagctctttaaagacagagatggtcaaaagtttgaaaccagcctggccaacatggtgaaatcccgtttctactaaaaatacaaaaaataaattagctaggcctggtggcgggcacctgtaatcccagctactcaggaggctgaggcaagagaatcacttgaacctgggaggcagaggttgcagtgagctgagatcacgccactgcactccggcatgggcaccagagcgagactccaactcaaaaagaaaaaagacagagatggggtctttcattcctcttaaaccccctctggggtgtcacaaactgctggacacagcagaggtttctgcatcacaaattcactgaaccagacatgggacaagatgttatagagatttgtaaacagaattggaaaggaaatagacaaggaagttgaagaagccaaagcaaaacctccaacagtgcagagaaggagcatcccaatggctaagctaggctttagccagagatgggcagcacatttagcacatccagccccagcttcctgaaggctaaagaaatgctcatgaacagacacaaaaacggtcagacccacctcccaagggtaactcccattacttctctaacaaatgagtaaatacctatgctacagtaggtacctagtcaggcatgagtaggggaggagagggcttcccccactacgcacacaccaggaatggcaggcgaccatcaggtgacggtcattgttaaactgtccttctaaaataataattggtcccagccagtgctagggaagggcagtctcccaataaacagaaatacctgaaactggtgatcagcagcttcccaataaaacctcagcagttgggtgagtgggctcaggcatgcgcactaagagccaaaatggcggaatttaaccagtatgtggccttcctccagggacactcaactggtaaggaaaaaatgcatcaagtggtcacgagtacaacactagtaaacgcactgtgcatgctccgcttctaagcgctagcaggccactgcacacgcagacacaccacttaagggaagaatcacaggagtagggacgcaagaccccagaagtatgccaacaggtaaaacctgaagtcagtcaggtgcggtggctcatgcctgtcatctcagcactttcagatggattatttgaggtaaggagtttgagaccagcctggtcaacatggtgaaacctcatctccattaaaaatacaaaaattagccgtgtgttgtggcaagtgcctgtaatcccagctactggagaggctgaggcaggagaatcacttgaacctgggaagtggaggttgcagtaagctgagatcgcgccacttctctccagcctgggtgacagagcaagagtctgtctcaaaaaaacgaacaaaaaccctaagtcaaagtcaaactgtacacttgtctttcaagttacccacttggcccttttccaagtgtattttctttcctttcattcctgttctaaagcttttgaataaactttcactcctgctctaaaacttgccccagtctctcctgccttatgaggaggcaagaattgaggctgctgtagatccatgtggattcactgctgctaacatactttggtgctgtgggactccagtacatttgctgccactaacacctagacgtgcatccacaggacagtgtgtatgtatgcatgagagacagacagagaggaagagcaagacagaaacagacaggccgggatgaaagtaatagaaatcttaagaaagaagagaaaagatcagaaaagaggccaagatactgagaagaaagagggtgaagagggtagcaagagagaggtacagctatttatagcctgtcttatggttgtgtaatacctgtctggctctggctgctgttatagtagcattttatgaaggttatccttccttaaggaataccataagaatttagctttcctacatagttgcaatattgaaaataaggctggtaattgggtcatcttattaggaaggaactatcacgaagcagttcaaagagcttccagttattccctcattaatccttacaacatgcttctggagtaactggagggcaaagatgaagaatatttagtccatttggatcctttctttagtgggctgtaattccacttgcatgctctctttttagattagagactcaagagcaagttatcgcagtgggcacatttgttttcattaaatattttcccccacctttttcacctcttgcttcatatgctgcaagaatgtcttagaatttatgtggaaaagccagggaatgcccacagtccgtcctccctgagttcagaccagcgctttctggtggagtacagtttcaattatgtgggtgcaaatgagccacgtttatgaattcttgtaagtgaaagaggtcatcataagatacaagtgtgaagacagagagaaacagacataggagcaagggtgaaggcaaattaggggaataggaaagaggggagaaagcacaggaggcagtcagggaggaagcgtttgtggatgttctgagtgttctcattccgatacccatggcccttcataagtgctctgtgtggcacccttaatgtgacaaagacatcagcgactctattaccctagggaccataagcttcactgggaaactccagctctgcagacatgatgtgggtgacagggcagggctgaggaagcacatggtaaggtctctggcaccaaaatatggatggcaatcccacctactttgagattaaactgtttctgtcacttcagctagaactatgggcaaataattccaggcagaacttggcctgtggattgtcagagcccctatgtgactaatgaagctgtcagaatggatgtaacaaggagactgggtatttctgttgggaggttcagtgatggttgtctttgccaccaggagacaaaagacatgagagcaatgccctcctatttgcttttggaagcattttctttgtgcgtgtgtagatgttttttaaaaaatagacaatcacttatggggaatctattgggatacaatgtgaagttttgatctatgtatacattgtagaaagattcaatcagctaattcacatgtttattaccttacatagttacctttcttttctatgtacatggaaaaaagaaaggtaactgtggtgaagacattaaaaatctattcttttagcaattttgaaatatacaatacattattttaaactgtggtcaccaagccatgcagtagatcactaaaacttattctttcagtctaactgagactttgtacccattgatcaacatcttctttttcctcattccttgcccccaagccccagcctctggtaaacaactttctactgtgtttctgagattgactttttcagattccacatataagtgagatcatacagtattcatctttctgtgcctggcttatttcagttagcatagtgctctccagttctacccttgttgagaatggcagaattttccttcttctaagggctgtatagtactccattgtgtctatataccacattttctttatccattggttaggttgctttcatatcttggttattgtgagtgatgctgaaatgaacatgagactacatacatcttttcaacatcctgatttcaattttctttagatacatacccagaagtgggattgctgaatcacgttagttctattgctagttttgtgaggaactgccacacgactttccaaaacagctgccttaatttacattcccactaatagtgtatagggttctctattccctgcattcttgccaaggcttgttatcattctctttggtagtaaccattctaacaggtatgaggtggcacctcattgtggttttaatttgcgtttccctgatgattagaggtgttgagcattcttccataagccagttggccattttggtgtcttcttttgagaaatgtttgctcagatcctttgcccacaacctggggtaaatcacttaatccctgtgaacattggtttccatgtttttaataagttttatttctaccttccctgcctcccagtttattgtgagaataaaaaagtggtttcctatacattatctcctttaacccataaatggctgtttaaaataaatagtatagtccttatttgcaggtgaggaaacagtaatgtgatggggggtggggtaaagtgattctgtcactgctatccatggtggagctcgggttctgactgggcactgccttgagtccaagccgcctctttccccaccaaaaagggcttcatttagccctttaatcacgtgagctgtcatccctgagatggcctacaaatggcagagggccagccactggggcatattgttagtcctcagaccacagtgtgttacttcactacaggtgagtcccattttactatgcaaatacacacacacacacacacacgcacacacacattttactacttctagttatagaagtaaacataagttcctttgggggaaaaaaaggaggggaaaaatcatacaaactcatgcagcatccatttatcctatcatttattagtgagatttttttcccccttgagtctcttactaatgtccctaacaaaatctcggtcctccaatttatcttccacacttctgctatagtaatctaaaaagtagaaaaaaatcagatcttaatactctacctaaaatgctactacagaggcttctggctgtttatagaattacatctaaacttcttatcaagtcatacaaagacatcagtgtgcttccaaaatgtcatgctccactgaacttttctatttttttttttctagaatgtatacaatttccattcccctgggtcaatttctattcgttttttgagacccgcctcaaatagcactttctggaggattctttcaactattcttgccatcagtcactccctccaaagtagcttctaagcattttgttcaaaaggttggcattgaacacagcctttcctactcagactgtcccctctggacaacaaatcctctggaggcaagggatgaacatatcttactactctaatcccaatatggtgctttgcacatacaaagtattaaataagagttcaataagcacattcaaaaagaaaataaataggctttatggttgaaagaagccaaataaatatctgaaaaataaatataaaaacatactcttaacaattatttttgaaaagttactaaatatgaatgccaaattaatagttatttcaatgtttgcacaaaatcttaagtgtcaaaaagaaaaaatggatataaagttatcacaacacatagactacaaatctgttcaagttctgtcagccacctgcctcagtgttgtatggaatagaggtaatatgcctctatagttcagcatttcctggaatgagttctgcaccttattcaatggtattataaaaataaaaatgtggtagggtagtgtttatagtagaacaattttgggaattattgggctaaacaagattcattttttgactacgtgtctactcatagccttttatatattaatgtgccttgggcctctatgagaagagacacaaaacacagcatgatccaactgtatttgatgatggaacttttttcccccaaggagaatctcacatgacaggtgttcatagagaacacactctgggaaacactgtcctactttcttagatgccattattagtcacttcacagagatgcttaaaaataaacacgttgatcatcaatgcagaaacccataggagcaaaaatctgaaatgacattctatataaatgttgcttcaaaatgatgaaataggctgtctattttcaccaaaatgcagcacaaaatagttgaaagagtataggctaagaaatagttatctacacgttacaagctgcacagtttggggcaagacatttctcaatagagaaagtatgttatgtatgtgaaaatcacacatcagcatgatgattttacctggactttctgaaacaaaatccataggaagacatagtcttaaaggatatggatgatgttttcagatgtaagggtactcatctgcccctctaagaccctatagcacctgctcaccacctacatctttaaataacttgagattgtcaggcatgaggcttagttcatacttctccacctacggcagtcataccctccttcacctctttctcgacaaccttggaagatgaggaattttccttcctactcagcccctcacccgtgcccctgtcctctatgcttctcctccagtccctcctgaatcttcagaattcttccttgactgattcttccctctctgcctgctacatgttccagtccctccaatcctgaaacaaatactgaaattgaaacacccctcctctcacccacattcctctctagttaccacccaaattttcttttcctctccttcaaatttctttaaagattcatccaaattgactacacccatttcctcacatctccttgacttttagaccattaaaatttggaatctacccgagttcaaccagtgtcccccaactgttgactccagtgggaagttcctatctcactgcatctcctagttatatttaataacattggtcatgctttcctcttgaaacacacaactctcgtggattgagtgacactgcaacccccttattttccttctgtttatctgctcatttggtctttgtctcctccaggggctctagtttctggactgatgccttagaagttgttttccccagggcttaagcctcagtccactgctgacttgatttacctttttctgagtgagcttgcccacgtgtgtatgatatccaaattatctcctgtccaacccaaacctcctcccgaagcttcagactcatattatctattggacaggtttacctgaaagtccctcaagtaattcacactcatcaattcaaacagaagcatattcatacctccaccatctccttggtggaggctcccttggtggaggtagtaagcattgtaagtagaagaggctgcttgggtccaaattgaggtcccagcactttccaggtgtgacctgggtaaattacttaatcctttcaaccattatctcatgggaaaaatggagatggccatagtccaatgcccagagggctgcttgaacaattaaatgggaggcatacagcacctctgcacagcaacagtgccaatgagttatcaatgaagctactacctccattagcattttccacactcgattttttccctctggaattccaggcattctttatctcatttggaagtgctagcatctgtcatcatagtcacataagccagccacctggaagtcgaccttgaccctcctcccttccacccctcacagactccccaacacaagtcctgcagattttgcctcctaaatatttctcaaaccctgtcactcctgtccatgtctacaactgcagccataaccccggttctcatcctctctcttctgatcatctcctctcctatcctgaattaccctgattccctgaagtgggccagagcaagctatctcaaatgagaatcatccatgtcactcccaccctgaaaacaccatccaacaccgccgctggctttccataaatgctactcaagaaataagtgaaagaaagatattaaagtgttgctgatgacatttccatgttttatagggtttgtgatgcagaacatgtgcagttgacccagtcctagaaatgcttgagcgggtgatgaacaacctgcctcaaggctgccagcattaggacagcacttttatactcacaggatggcccagctaggggggatgcccagcacacatgactgcgggtccaccagcacccactttcagctctgccccatccctctcctctgaagagactggaaaaagggaatactttcacagcttgccttacagctaagggtagcaaatgaaacataaacgattgccagaagtgcctgggaaagcttttgttttcctgataagtggggtggggcatgctaatgccatccttctcctcatctttctgctgtaaccagaaatgtgaagcttgaatctgtgagggccatcatagaattgagggaaaggtcaggagaatctccaaagcgctgacctggacacccccaggttcctgtggttgaactccagggagaaagaaacttgctcatggaccctactgtcacttcggagggctcctcagggagtgaaacctctgccgttttgagggggagacctggtaagaaatacagcttgggatttcaccctcaactgggtatcaaaaaagcaggggcccatgtcaaagtaacagcaaattaacaccagaagctgctcccaagctttcacagtctcagccacaggttagtaaaacctgtgattaccactcccctccttgcctttcatgatttgtcgaggctgcaggctcagaggtgagagagagagaaggccctgcagactcccagggcatttttcagccacacccacctcctcagattcattaacacctcccacctaacacagagatagctgtgctctgccagcaactcatgaacgcagttatcaaagcacaaagaacccctgcagcacagctcatcaagccgtggccaggtaaggcagtagctctcctgctcaccttctctactcagagcccagcacaccatccaagagccctatttatttaaatatttagaaagaaagaaggaagaaggaaagaagggaggaagggaggaagggagggaggaaggaaggaatggagggagtgagagagagagggagggagggagggagggagggagggagggagggagggagagaaggaaattggttagaaggcagaatcacataaataaatcccatgacctaggttctgagaacagcaacatagggaaactccagtgtactaacatatctcagctcatctatacaggcacagggaatgagagagcaacctcaacaaaaaaactgaatgcaaattggaagcaactaagtataaagttattttttctgtattttaaatataataatagcttgctttatgaaacagctatgtttttacctatataacaaacctgcacatttacccccgaacctaaaaaaaaagtttttttaagtatatagtgagtgtgatggttaatactgtcaacttgattggatggaaggatacaaagtattaatcctaggtgttgccaaaagagattaacatttgagtcagtgggctggggaaggcagatccacccttaatctggtgggcacaagctaatcagcttccagtgaatataaagcaggcagaaaaacttgaaaaggagagatgggcctagcctcccagcctacatctttctcccatgctggatgcttcctgcctttgaacatcagactccaagttcttcagttttgggacttggactggctctcattgctcctcagcttgcagacagcctattgtgggaccttgtgaccatataaattaatacttaaataaactcccctttatatgtatatacacacaacactcacacacacacacacacatatatatatatacacacacgtatatgtacaaacacacacacacacatatatatatcctattaggtctgtccctcaagagaacactgactaatatagtgagtgacagtaagtcaatctttgttggtaagtctcttgttataaacactcttaaagatgtactggtagagattcttttttttttagtctttttttaaaaatttatttatttattattataatactttaagttttagggtacatgtgcacaatgtgcaggttagttacatgtgtatacatgtgccatggtggtgcgctgcacccactaactcgtcatccagcattaggtatatctcccaatgctatccctcccccctccccccaccccacaacaggccccagagtgtgatgttccccttcctgtgtccatgtgttctcattgttcaattcccacctgtgagtgagaatatgcggtgtttggttttttgttcttgcgatagtttactgagaatgatgatttccaatttcatccatgtccctacaaaggacatgaactcatccttttttatggctgcatagtattccatggtgtatatgtgccacattttcttaatccagtctatcattgttggatatttgggttggttccaagtctttgctattgtgaataatgccgcaataaacatacgtgtgcatgtgtctttatagcagcatgatttatagtcctttgggtatatacccagtaatgggatggctgggtcaaatggtatttctagttctagatctctgaggaattgccacactgacttccacaatggttgaactagtttacagtcccaccaacagtgtaaaattgttcctatttctccacatcctctccagcacctgttgtttcctgactttttaatgattgccattctaactggtgtgagatggcatctcattgtggttttgatttgcatttctctgatggccagtgatggtgagcattttttcatgtgttttttggctgcataaatgtcttcttttgagaagtgtctgttcatatccttcgcccactttttgatggggttgtttgtttttttcttgtaaatttgtttgagttcattgtagattctggatattagccctttgtcagatgagtaggttgcaaaaattttctcccattctgtaggttgcctgttcactctgatggtagtttcttttgctgtgcagaagctcttgagtttaattagatcccatttgtcaattttggcttttgttgccattgcttttggtgttttagacatgaagtccttgcccatgcctatgtcctgaatggtaatgcctaggttttcttctagggtttttatggttttaggtctaacgtttaagtctttaatccatcttgaattgatttttgtataagctgtaaggaagggatccaatttcagctttctacatatggctagccagttttcccagcaccatttattaaatagggaatcctttccccattgcttgtttttctcaggtttgtcaaagatcagatagttgtagatatgtggcattatttctgagggctctgttctgttccattgatctatatctctgttttggtaccagtactatgctgttttggttactgtagccttgtagtatagtttgaagtcaggtagtgtgatgcctccagctttgttcttttggcttaggattgatttggcaatgcgggctcttttttggttccatgtgaactttaaagtagttttttccaattctgtgaagaaagtcactggtagcttgatggggatggcattgaatctgtaaattaccttgggcagtatggccattttcacgatattgattcttcctacccatgagcatggaatgttcttccatttgtttgtatcctcttttatttccttgagcagtggtttgtagttctccttgaagaggtccttcacatcccttgtaagttggattcctaggtattttattctctttgaagcaattgtgaatgggaattcactcatgatttggctctctgtttgtctgttgctggtgtataagaatgcttgtgatttttgtacattgattttgtatcctgagactttgctgaagttgcttatcagcttaaggagcttttgggctgagacaatggggttttctagatatacaatcatgtcgtctgcaaacagggacaatttgacttcctcttctcctaattgaataccctttatttccttctcctgcctaattgccctggccagaacttccaacactatgttgaataggagtggtgagagagggcatccctgtcttgtgccagttttcaaagggaatgcttccagttttggcccattcagtatgatattggctgtgggtttgtcatagatagctcttattattttgaaatacatcccatcaatacctaatttattgagagtttttagcatgaagggttgttgaattttgtcaaaggccttttctgcatctattgagataatcatgtggtttttgtctttggttctgtttatatgctggattacatttattgatttgcgtatattgaaccagccttgcatcccagggatgaagcccacttgatcatggtggataagctttttgatgtgctgctggattcggtttgccagtattttactgaggatttttgcatcaatgttcatcaaagatattggtctaaaattctcttttttggttgtgtctctgcccggctttggtatcaggatgatgctggcctcatgaaatgacttagggaggattccctctttttctattgattggaatagtttcagaaggaatggtaccagttcctccttgtacctctggtagaatttggctgtgaatccatctggtcctggactctttttggttggtaagctattgatcattgccacaatttcagatcctgttattggtctattcagagattcaacttcttcctggtttagtcttgggagagtgtatgtgtccagaaatttatccatttcttctagattttctagtttatttgcatagaggtgtttgtagtattctctgatggtagtttgtatttctgtgggatcggtggtgatatcccctttatcattttttattgtgtctatttgattcttctctctttttttctttattagtcttgttagcggtctatcaattttgttgatcctttcaaaaaaccagctcctggattcattaattttttgaagggttttttgtgtctctatttccttcagttctgctctgattttagttatttcttgccttctgctagcttttgaatgtgtttgctcttgcttttctagttcctttaattgtgatgttagggtgtcaattttggatctttcctgctttctcttgtgggcatttagtgctataaatttccctctacacactgctttgaatgcgtccctgagattctggtgtgttgtgtctttgttctcgttggtttcaaagaacatctttatttctgccttcatttcattatgtatccagtagtcattcaggggcaagttgttcagtttccatgtagttgagccgttttgagtgagattcttaatcctgagttctagtttgattgcactgtggtctgagagatagtttgttataatttctgttcttttacatttgctgaggagagctttacttcccagtatgtggtcaattttggaataggtgtggtgtggtgctgaaaaaaatgtatattctgttgatttggggtggagagttctgtagatgtctattaggtccgcttggtgcagagctgagttcaattcctgggtatccttgttgactttctgtctcgttgatctgtctaatgttgacagtggggtgttaaagcctcccattattaatgtgtgggagtctaagtctctttgtaggtcactcaggacttgctttatgaatcttggtgctcctgtattgggtgcatataaatttaggagagttagctcttcttgttgaattgatccctttaccattatgtaatggccttctttgtctcttttgatctttgttggtttgaagtctgttttatcagagactaggattgcaacccctgcttttttttgttttccatttgcttggtagatcttcctccatccttttatcttgagcctatgtgtgtctctgcatgtgagatgggtttcctgaatacagcacactgatgggtcttgactctttatccaatttgccagtctgtgtcttttaattggagcatttagtccatttacattcaaagttaatattgttatgtgtgaatttgatcctgtcattatgatgttagctggtgattttgctcattagttgatggagtttcttcctagtcttgatggtctttacattttggcatgattttgcagtggctggtactggttgttcctttccatgtttagcgcttccttcaggagctcttttagggcaggcctggtggtgacaaaatctcttagcatttgcttgtctgtaacgtattttatttctccttcacttatgaagcttagtttggctggatatgaaattcggggttgaaaattcttttctttaagaatgttgaatattggcccccactctcttctggcttgtagggtttctgccgagagatccgctgttagtctgatgggcttccctttgagggtaacccaacctttctctctggctgcccttaacattttttccttcatttcaactttggtgaatctgacaattatgtgtcttggagttgctcttctcgaggagtatctttgtggcgttctctgtatttcctgaatctgaacgttggcctgccttgctagattggggaagttctcctggataatatcctgcagagtgttttccaacttggttccattctccccatcactttcaggtacaccaatcagacgtagatttggtcttttcacatagtcccatatttcttagaggctttgctcatttctttttattcttttttctctaaacttcccttctcacttcatttcgttcatttcatcttccatcgctgataccctttcttccagttgatcgcatcggctcctgaggcttctgcattcttcacgtagttctcgagccttgcttttcagctccatcagctcctttaagcacttctctgtattggttattctagttatacattcttctaaatttttttcaaagttttcaacttctttgcctttggtttgaatgtcctcccgtagctcagagtaatttgatcgtctgaagccttcttctctcagctcgtcaaagtcattctccatccagctttgttccgttgctggtgaggaacttcatttctttggaggaggagaggcggtctgctttttagagtttccagtttttctgttctgttttttccccatctttgtggttttatctacttttggtctttgatgatggtgatgtacagatgggtttttggtgtggatgtcctttctgtttgtcagttttccttctaacagacaggacactcagctgcaggtctgttggagtaccctgccgtgtgaagtgtcagtgtgcccctgctggggggtgcctcccagttaggctgcttgggggtcaggggtcagggacccacttgaggaggcagtctgcctgttctcagatctccagctgtgtgctgggagaaccactgctctcttcaaagctgtcagacagggacatttaagtgtgcagaggttactgctgtctttttgtttgtctgtgccctgaggtggagcctacagaggcaggctggcctccttgagctgtggtgggctccacccagttcgagcttccaggctgctttgtttcagtaagcaagcctgggcaatggcgggcgcccctcccccagcctctctgccgccttgcagtttgatctcagactgctgtgccagcaatcagcgagactccgtgggcgtaggaccctctgatccaggtgcgggatataatctcctgatgcgccgttttttaagcctgtcggaaaagtgcagtattggggtgggagtgaccccattttccaggtgccgtccgtcacccctttctttgactcggaaagggaactccctgaccccttgcacttcctgagtgaggcaatgcctcgccctgcttcggctcgcgcacagtgcacgcacccactgacttgtgcccactgtgcggcactccctagtgagatgaaccccatacctcagatggaaatgcagaaatcactgtcttctgggtcgctcaggctgggagctgtagacctgagctgttcctattcggccatcttggctcctccccccgagattcttttaagtgccctttatttttaacaaagtatttattctcgtctgtttttttttttaatttatgttacattttggttcacttttaatagtaaatgatatctcaaatgtttagacatttagctgattgtaaaacgttagctaaaatggatcttctcttgaaatggtgttgccagatttttaaaaatgaatagaaattatattctttttcgtttttaaaccatcacttttaccttctgagtttctggaaattgaggtgcacctgtatatagaaacctttgcacttaatttcatttctagttcacgttctatacttgtctcttctcattatagcaattagccttaaaatctaatttccttggctttattcagtcctattgaaacaggcactgaattttaagagaattatttccccagcaatgttcttttttcttcctgtcttacaactatggcagccatgaagttgaggctctcatgtaacttcctgaatgatgtgagatgcagaaatgactctgatcaagataaatcctctaccatgggtccttccacgcccctcgaagtgtgcttaatttctacactaaatagtagagtgtggaattttgtcacttgcctttcttgtatctacaacaggttgggcaatgaaacatcttcaaatgtgtgtgacctataatagaaaatcttcaaatacatgtggccctgtaatggcccacacatactagaatacagcttaactctgaacgcacacatcatgggttctgaaaggtttagaatacatgttggtttaaaaatatacagattttatctcaaaaacaaattagctatgcttttccccctcttttattgagggaacaaaagtaatagtatttcttgtgtaaaaaagaaaagaggacttaaaatgttcactgtaatggatgctgtggtgggctgcctggacctttcccattgttgggagtgttggtggctgacaattctcattcatttagttgctttcaggggttaccctcagccacagagaaccaattacaccaaggctgtaaccccagtcaaggtataaaaggtataacaggcccatgcccttggctcaaggcgagacaactctgaagatccaacccatagctagagttcaccttgagatccacgggggccctgtctgcactgcagttcaactcctccctctgtccaacagtgattcctccactcccttgcagatgttgatcctgagagatctccccagtaaactttctgcgcacaagtcttcttctcagagtttatttcctagtaacccgatctaagacattcatcttaccagtttttctaagacttccattatcataattattttctgaacggcctatgagagtgtttcaaacctcagacaagtccaattcagaattgaagcttccctctcctcttctccccaccctaaatatttggctttaaagatggagataaaacttccctcataattgcagcagaactgtggtccagagcttcaaacgtgaatttgttgtcatgcacgggatgtaatatgttgttaggcaggtgattttgtcattgtgtgaacatcatagaaacaaagatggtacagcccactacacacctaggctatatggcagagcctactgctgttaggttacagactcatagtgtgttttactgtactgaatacagcactgcaggcaattgtaacacaatggtaagtatttatatataaacatagaaacatttatatataaacatagaaaaagtacagtaaaaatacaatataaaaagtaaaaaatggtacacctgcataggacacttaccatgaatggaacgtgcaggaccagaagtagccctgggtgagtggtgagtgaatgcgaaggcctaggtcattactgcatgctactgtagactttataaacactataaacttaggctacagtacatttaaaaaaataagtaatctcactattctattatgatagctatgacatcactatgtaacaggaatttttcagctccatcagaatctcataagatcacctatgcatgatctgtcattgactgaaatgttgctatgtggcacataactgtacatggttcttgctttcttctacagtgtcagagtttccagtttttagttaagtctgttaaatttcctcaaaaaattgtcttttttacattaatactcattccatctgagatttactactgtatatgggacaagatgagggtcaatttttaaactttcttccagttggagagtcagttatttctgcatcatttatgtaaaaacaaacaagcaaacagataaaatctcatatggtcttcttacttcatgaaaccaacaatcatattaactcatatactgaaatccatttctggattctctattatgtcctactaaatatttttcatagtatgttctgatagccgcttcagaaagaaaatactcttacttattatttctttgtatgatttccttggttatcaccaggtaattattatttcaaatgaactttaagattattttatacaagtccaaaaaaccaaaaccaaagccaaagacaactcaaaactccactgggattctaattggaaatgcattaaatttacatattaattttgggaggcttttaaaaattgacaatcataattgtatatgtttatggggttttgggatgtgatgttttgatcaatatgtgatgttttgatcaaaatatacattgtggattgattaattcaagctaattaacatattcattccttcacataccatttctttgtggtgagaatatttaaaatctactcttttagtaatttggaaatatacattattattaactatagtcaccatgctgtggaataggtcactaaaactcattccttccatctaactgaaattttgtattctttgaccaaccccttgggagactaaaaatgtatacagaaagacttcccactcaagaacatgtttgacttttcattggtttctcatgttttttattaagatttaatagctggtttatataggttgcgtgttcaggttttagtcctacattttatagttttggtcatgtgaaatttttttatgtctatttctgggtgcttagtgctggggaagataaaagttattgatttttatatatttatcttctatctagccaacttacaaagttttattaatacagtgcttttttcccttgaatctgttgggttttctacatacacaatcatagtattagcaaatatatagttttacttcttagtttccagcatttatagcagatgtatctcttacattgttcatttactaaaacctttaaagtacttctttttaaaaagggaatgatgatagcaggcatttctttctaatttctgattacagtgaaatttgttaacttttttccacttagatatcaaaagttgttgttttgatgtaagcaatctttattatcattgaggtgttttttttctaaatttttccccttaaactcttcctaaaactggatgctgaattttaccatgtacctttctgtgactgctgatttgattgcctaattttttcctttaatttgtgcataggattatatgggcagatttcctatgttgtgccacccctgcttctctgtgcatgtatttccttgataatcttataaattcctatagaaatgtttaccaaaatgtgtcaaaagttaatagctataacttaataaaagggttccatgatcaaattaatttaagaagcaccagaccaaagttaaatggtccttccccagacctttgaagctaatgtgcatcgttaatcttcaagaggaggttaaaggctgggcatggtgtctcatgcctgcaatcccagcactttgggaagctgaggtgggtggataacttgaggttaggagtgcgaaaccagcctggacaacatggtgaaactctgcctctaccaaaaatacataaaattagctgggcgtaatggtgtgcaactgtggtcccagctactctggaggctgaggcaccagaatcgcttgaacctaggaggaagaggttgcagtgagctgagatcacaccactgttccagcctgggcaacagagcaagactctgtctcaaaaaaaaaaaaaaaaaaaagggtgattaaagtacaaagtgtttagtgaagtttattggactatatttttcacgggccatcccatgggactagatcagagcagaatcaactttcggaatgcatacttggattgcatgctaagatttacaaacattttcagcacgagaccaattaaatcatggagataaaagttagaatcataggatgccaaaaccatttgtttgaggaagaataatttagttaagcaacacattataccagttttacttttatttatatgagattttctccttgggtgggcccaagttatcaatatttggcactatacagaccagtcttagagcacagggtaattcaggggctggatgtcattccagctcctgccactgttgacatatgacactaggaaatcacacaactgtgcctgtacccacctctctctacaatgcaacccatggtgtcaagactggagcttgcacatggcactcaccaatgacgtattccaccctgaagagatcccttctggggtcatatggacgactgaagtcaatctgcacatagaaagactgccctctgcggacaatcagcttgttgttttcatacttgtcagtgtggtggtccaccttgttagtgtcccatctctccttgaacaggtgaacgctcgtgacattaagaaactctatgaacaagaaaaacaagggttgaagaaaataatcaactaactttagtttaaacataaactcaaaaacaagattattttccctgaagaaggcaggtagcaaggtctgctgaatgaaactctgtaggaggcaggggtaggggaacacagtctcgagagtcagcctcttgtgacattcttgtttttgaagagagctttttaaagctttttccacctttgatctcgtttcagaccacaaggcactcactgtgggatagatggatgcctgtctgggagatccaaatacagagaagctagggccagagttgaagtcttcaggttctcagtctcacgctagttttcgttatgttagaagcttcccatcatgtcactgcctcactctgtgactaaccaggcagaagcagggaatagccacttcaattttcttatctttccaaaggaaggaatcaaatctgacaaagcctcaaggggacattcgaaggacaaagttagccattaatctaaaattctccttttacctcaaaaagggtcaaatgcctcctccctctgtaattctaaaagtagatctcatccctcaaatgcaggaaagagagggagcaggtctggagaaaggacactaagatttccatgagataagtgtgattgttttcagtgacacagaaactatcctcagctttccttagctactaatgggccagttcaaaagtcaaaacctggactgtctgatgccaacattcacaggtttttcttttgatttgtggcatcaggagtgtaaacgtaaatcacatgtttcttagttgtctaactttgtatgtgtgacttaaattcatttcttcatcatagaatggagacactaatattcatttcatagcctaacatgttccacttcttacaggaatgtgacaggagacggcatgagatgacacgtatgcaagcatttagcaaagggtctgacacatgaaagtcagctctcttcctgcccttttccccttcccctctatgaatgatgactgaaagtgggggtcatcctaactccctgtcctcactgtactttagaagatctagtctagagactggtttctgcatgtgcatttggcattgtaaagagttattggggagaaggtggggtgggagggtagaagggtcggcaggggtgccctggcctcttgccctccccctccctgcccctgcctgatgcatgatttgccttcatggctataagcaccatgtgcgcagaaagcacagttgctgagcttgtacccatgccggggcatctcctgccatagtcgaatggcttcctttacctccacacataaatcctgtgcaggatgcctggtccctttggaccccattgtgttccatagtcaaaaccaagaagttgggctctttaagatcctcttcggtcctaaagtccaggagttcctgaaacactgctgagcaattcaaagttcaggcaatcctgagtttgaatctcaggtgtcaaaattactgcgttaaggtactttacctttcagaatctgaattttcttattttaaaatgaggatactaataccctgagaaggtctatgaaggctcaatgagataacggtgcagtgggtctggcactatgcctggcacatagtgggtcctaggcttactgtggctcactgcccctaaactgtgacagccatttcacagggcgtggtgctccccgggttaccctgactgcagcattacggcaagcagaaagtgcaggatgcagttttatttttacctcttctcagaaccctgttgtatacatgttcccctgaagggcactttctttccattatgctgtgagctaaagatgtttaattctctagacctctctattccaagctgcctttctcctaagtcctctggtcttattaagaccacaatccccgtgataaaccagcccaagaatgagctggaggagcacaaatgttcctgttgaaaaggagcttagcaatcaactcctctggtcctctttcttagcacaggggctttaaaattttttttttaaaaatagctaaacaccaaagtccttagaaatgggtttcatcagttctccgtttaccagcaccaatggaaggaatatactgatattacatccttacagaatctcacagaacagcaatagcattttctcagccatctggtagaactactataccctgcatgaaacattttcatgagagccctactacttgggcttctagcttccatttgaacagggaactcattttttcatagggcaaacagtccatttttaaacaactctaattatttgaaaacttctcttaagataaactgacatctgcttccttgtaatttttctaaccatgggtcctcgttctgacttctagataaatatagaataagtcctcttattcattttagctggcactctctaggtatttaaagactgctcataggattttttttttttctgagtaaaacattcttcatttatttaactgtttgcttgtttgaaacagagtcttgctctgttacccagactggagtgcagtggcgcgatctcggctcactgcaacctctgcctcctgggttcaagcaatcctccccacctcatcctcctgagtagctgggattgcaggcactcaccaccataccccgctaatttttgtatttttaaaaaatttaatagagacggggtttcaccatgttggccaggctggtcttgaactcctgacctcaggtgatccgccggcttggctttccaaagtgctaagattataggcgtgagccatcacatccagcctatttaactgtttttaagaagttatttctagaacttttatccaacgctctgttttggaatattttccactttgtcaatttctcttttgaagtgttattttctggaattaagtacattactctagttgtggtttttctgtaaaaaaaaaaaaaagagaccattacatcttttaaaataaacagtctattatttcaaatcaagatattgtcagtgtcttggatactcttaactcactgttgatttatattatgcatctgataaagcaaaacccttaaaacacattcttttttttttttttttttttttttgaggcagagtcctgctctgttgctcaggctggagttcagtggtgcaatttcagctcactgcaacttctgcctcccgggttcaagcaattctcatgtctcagcctctcaagttgctaagactacaggctcacaccaccatgcctggctaatttgtttgtttttgtttttgttttagtagagatggggtttcactatattggtcaggctggtcttgaactcctgacctcaggtaatccccctgcctcagcctcccttaaaacacattctaatgttatttctagcaacaatggatcaaaattcagttgaggcccctacaagtcacccactcatgttgctatttggctatatttatttgtgcaattgttttcttctgtttagttcgatattaagactttgcatgggttaaatttcttcttattgaatttggctcactgtcccatgctcttaagatcattttaacccctaagtatgcatttaatatatttaatattctccctagcttcttgtcctctgggaatgttataagtgtgctattttatgttgccactcaagacatgggtataaatgttgattaggcaactgtctaataactactaactaagtaaacgcacagcagtagatgctaaaatgtggacagataattatgacacagtgtcagacatctctgacaaaggaagtaaagagaactgaggggagtatcagggaggagcccctaacccacatttagggggtagaaaataaggaatttctctgaaggaagtgagacataagcagtgagcaaaagaggagtcagttgtccatgtggaaaggggggtggagaggaatgcttcaggcggagaaagaaggataggtgaagactgaggcaagagagtgcatagttgcttaagaaattgaaagatgatggttggctgaaatgtactagtgggagccacggtggaagagtaaggaggagcctgctcatcacacgagccttggagaccatgcgaaggagtttgggttttaattgcatggtggatccagtgaagaatctgaaacagcaaactgacatgattagatttatatatatattgaaactgcttctggtggcagagtggaaaagggattggaaggggcaaagctggaagctgaacccagttaagaagctgttgcagtgttctgggtgaggggccacgtgagtttagcctgcatgtaggggttcaaggcactgctcctctggtactcctggatttgccttctctattcctaccctccctccctgcatgataatgtgtccctgaaatgagtcctgccttggcttcccaagcagctctacctacaaggcaaagtaaggctggagacggagaaatattcgagtatttctttggtatcattggtatgtctcatccatcctagttctcattgcaaatgaaaacctggctttccagctttacctcctagcctagtgtacctggttaatgtctagtgagactggttagagtcagtccatcatggcatagtgctagttttatgggatattgacaggtattggaagaattagagctccatgtttaaaccagtgtggaaaatgctggcctaaccaaagctgatcaggattctttactgaagcattcatgtgagactttaatatgctgatgtataccacagatatctcagaggggcaatggtttccaaatgtaaatgactatggaaacttttttctttggagatctgcatttttcagaatatgtttttggaaatgcttcactacttacttattgtgcagcctcagaaaagttatttaatctatctgagcctcagttttcttatctttaatatgggaatgaagtacctatcttatagagtggctgacaccaagtacattcttaataaatgtttattattattgttgttgttattattattaagagaagtagaagagcatagtaagagcatagactgtggagctaggctgcctgaacccaaatcccaactctcacgtactgtctttgtgaccttggcaagttacataaatgtcctgtgcctcagttttctcatctgcaaaatgaagttggtgtgaggattaaatgagaaaatgcaccgagtgctctatcctagggcctggtacatggtaaatgctcagaaattgatggcaataataatcataatagcactgagcatttggattggcccttaggaccaatcattaagtagtcaggtatctgagaaggcatggtgcgaggctggaatctgagcaatggaagtcacaaggtaaagaatgtccctgggaagctttttagcagtggccttccagccttcccagggaagcatgccattttatactccttgtcttctgagcagacaggcttgctttgaatttccacaggtaaatagaaagcatttctcctcttgattcgcaggaaacatctgtcttctttttaaaaaaaaaaaagtatcatcgtctctttgtattatctttatataggtgattttttagccatgggattgtaatccccttgaagactggaccatgtcttaattatcttgctatagtgcctggggcagtgtgcagaaatgccacagcaaatatgcctcctttcacctgaacaccttttacgtgaaaatttggagcgtagagttgatcattcatttcaaaataaattatctcatttactgtaggattaaccataggtgtcctttaaatgtcatttcccattttattctcaaaatatgctagtttcaggacatatatatagttgaaggtatgatgtgggaatttataacataagacctccagatcagcagttttgtttcacattggaataaaatactgtctttctagcctgcttatatgttgataacaaagggtgagaaaaagggtgctgattaatgcctttgagaatagaaaacctaagtcaaaaaaaaaaagacaaaaccccagctcatgggtttatagtttttccatagtgtaaacaaacatacatatatatcatgaatatatatgtttatatataatatataaaaacatatattgtttacatataatatataaaaacatatattgtttatatattatatattgttcatataaattatatatattacatgtgtttatattatatgatggatataaacaaataatatattacaaatatatatttatatattatatattatttatatctttatatattatatactgtttatatataatagatataagcaaactatatatttgtttgttttcactatgaaaaaactataaacccatgagtttgggttttaaaaatatattgtttacatatataatatatagtttttatatattatttatgtatatattgtttacatattataaacaatatatttatatatgatatgtgtatatatattatatataagcaaactttttatatatatataaagttacatatatataaagttatacgtataaaacaaaatttatttcattgcccatgagtcagccacccacaggtcaaccaagtatttggttcttatgacagctgatagtatcaattgttttaaattatatcatctatactggtatactttagacatttaattctaagcatgatgttttctaacatgttactttttctaagtgatcttttgattctctgttgcaatatcacttcaacaagccaatgcctcaggaaaaacataaaatcacagtggtactataagtggggaaaaactaaggcagtgataagtaaaactttcctgtataatctcttaaaagtgcgtcttgggggccgggcgcggtggctcatgcctgtaattccagtactttgggaggcgagaggggcagatcacgagatcaggagatcgagaccatcctggctaacacggtgaaaccctgtctctactaaaaatacaaaaaattagccgggagtggtggtgggcgcctgtagtcccagctactcgggaggctgaggcaggagaaccgcttgaacccgggaggtggagcttgcagtgagccgagatcgcgccactgcactccagcctggcgacagagccggactccgtctcaaaacaaaaacaaaaaaagtctgtcttaaaatgatttaaacaaagaaagacatttcataaaaaaaaaataaaacttggctaagaaggggaagattaaaagctacacagagaggttgagagtttaaagaaataatgttccagactgtagtcaaatggaaaagacatgaggaagcttaatgggttgtccaaagtattggggatagaggtgaggtccccaataccactgattcaacaaaatttatttcattgcccatgagtcagccacacacaggtcaaccaagtatttggttcttataacagctgatagtatcaaagactctgaagatgactgtataaaatatgaacatagacataaaaatatcattgttcattccattgtccattttgcctaggaaatgtcccttgccatggagtgtgttccagcaagcattgatgaatctagcatattgatttttgctttgtttactgggttaacaaggcagtttagatggaaaaagtcttatcatcatccagactccgtttgccacaaacaggaaatgaatttgcttcccctgtccaagcctagttcctggcaaaatggaacagctcattgctaagccgccttttttttttttttttttttaaatacggtagctagaaacttggcagctcgctctttcaaagtgacagctttcaaactgtctacctaacacaatttagcctaattccaaacatatcggaaaatggactgttaaagaaaagaaaaaaatctccggaggagcaactgcctccctgtcctcctactttttgtctaatatgaacaaaatgtaaattattgtctccctaggttgtaaaatattcttcagagaatgattatacctgtcacagatgggatcttgaaataagttaaatgtttaggtttatatactaggaattccctagtgaactgaattctccatgcaatttttggtaatattgttattgaactataagcataaatgctatccatgagaaactggtttatttatttaaaaaaaaacaggaaaaataactctttctcacatttcttttgggtacccagaattttaacatgtccttaattagaatgattaaaagcattttcttaagtggcttaatttataaagtgttgttattaatacatcctggaacctataatgttgaaggattgctcaggtgctcagaggaagctggaacaagagaaatgagccccatacctccaggggctaaaatccctctggtctattcctcttctagcctggagtatctctacagcttccaaacatatctcctgttctccattttctccttacacttttttttttttttttttttgaaacagagtcttggtcttgtcgcccaggctggagtgcaatggcacaatctcggctcactgcaacctccacctcccaggttcaagcgattctcctgcctcagcctcccgagtagctgggattacaggcgcccaccaccacaccaggctaatttttgtatttttagtagagacagggtttcaccatgttggccaggctggtctcgaactcctgatctggtgatctgcccacctcggcctcccaaagtgctggggttacaagcatgagccaccgtgcccagccctccctaccactttgtaaagcataattctgattatgtatttctgctaattagaatccttctcaagtcccccattatctgcaggaggaaagcaagatccccaaggcctggtatggtgtgatgcctgccatcttttcccaggcttatatcttctctttcatcttttagtccctcctcacttgcaatatactgttccctctactgcaaacacttttccatgcgcttgcctgtcaggaacactcatactcatcctctaagtctcggctccaatatccttgcatcaggaagccctcctcatcctcttccccactccaccacaccgctagacattgatttctgttatttcactgcaatttgcataaatcacagtcacagtctttattacactgaattgcaatgatcttttatttattttgtcttctacactgagagtttcttgaggccagggactaacttactcaacttcatgtcccaagggacagcctggagcagctcctgacacatatgtgaaaaccagtgtatatttttccaggaactgaatgaaaggaggaactgctgctggacaatagcatttctcagtcatacactgaatgcctcttagtctctcagtaaccttcaatccagagaggtttactctgcacaaagaggaggtttatcattaattggttgatttaattctgacaaggagtggtgggatggaggagattcttagaaaggtataagaccccattagcctgaaaaactactagaacccagtttttaaatagggccaggcttgctttccagttttaattcaatacaatagaactgttaaatgattccaattactgctacaaatggtcgcctattgttaacaatatagagccaaagcagaccaacaacataaggtttcttctggaatattacatttccagctacacataacctttcagaccaggaaggcagtggagagatttttcagaaacaccaactaagcctgcagaacagtctattagaaattgatacaaatccaaatctgaggagatcgtctcagtacctttcctggctacaactgaattcaaagggtgacattaaagatgcctaaaatcatgcaaagatgtcaaacgctaccactgaatggctggtcccacctctgggatttccgtgcctacctcaaatatttcatttttttttcttgaatatcatggtgtgtatgagaggaaacttacatgagtttatacattttaaaatacagattttaccaaaataattcttaaccaaatgttaccaaagccatgacttaagggcgttatatacactcagtataccttagaacactgtatatatcacacacagtgatgggcaggactcactgctacagaactattagaaatgaaaaacccgccatttccccccttttcctcttcttgcctctctgcatttctcagtcagtattacaagagcagcttgctaactggaagagtggccactgaaaaaaatggagacaagagtttaacttggggctggtgttcctggagccaaagtcatcatccgcagattggtaaccgcggatacaaggcctcttagaggccactagtggccactgggtgaactgcatgaagatggcattttaaaaatgagtgttctttccaaggtttagtcgcttagcaaatttcgtcccttagtgacttggagaaaacttgatatatagtgccagaaaacctgcttttagaacaattaaatataaatctgaaatgcaaaaggtaaccaggagatagacctccttgttcagatggtttgtgtgctgctatgtgtgtgtgcatatatatatatatatatatatatatatatatatatatatatatatatatatatatatatatagtttttttcctgtccttctcatctgggacttgctgtcatgattctgggcttcagaaaccgtatccccagagcatgtaacacttatcttgtctgtgaaaaatattaaatgaatgcatatgtatgaaatctgtagcttgttattaataataaattataatgccactagagctatgagtcattcaattcacaagtgattgactgttcgttcattcattctacagtcactggacattcatattcctatgccagtgcctctaatggatatcccagaatgtcacttgggttgtggacacatatgtctgccaagtaaataatgactgattttttcagagtaattcagttatgctgctccccacctgtgcctccagaaatcaacaaaagcagtaatcccagattttatttttcttaattggcctacctgcacatgttctctgacagttttaatgtcttactagcagcattttgttcagatgtcagatttatgggggctacaggtcgtacatattcctcataggaacaagtattccctggagtgctttcctgaccttgctgggatatgataagttgcacattcccagtcaatgaacacttattggtcacgtgctgtgggtcagacttgatcacagacactgctcactagatgctcacgacaatctgtgaagtaggcattgcttccattttgctgatggagaaactgaggcttgggcaccaatatgactttcccagagtgagcaagaagtggcagatgtggaacaggaagccaggtcttctgcctctgctctctgcttccctgcttccctgcactgcctttgtagaggttcccgtttttcccaatcctggcaagggtggctgtgtcctgactcctcgtggcaaggacggttgtgtcattactcctcctgttcttactgcccacttcttccagtgcctacaccccctttccgggggcccagagtcttttgggccacaggggaattttgctagaagatggaatacacaaaggcaacctgcttaataatttgatatctgtaggcttttgcattttatttgcattcttaaagaaaaagactcgtagactgggtaagcagtgaatatcaactgcttaccttcagcctctatttcctaacatataacatggggatgaggattcattgattagcaagtcctcttaaactcagttctgtggctgtcaaggtggggttttagagagtggcatccagctgggagacagatttcagaactacaagttcgtcttagcccctcaaactctaccacctgactgaagatgcccttctgttctgtgaacttcttttcccaaacttggatggtactggatacctccctgatttcactatttgatatcaaatcatctagtgtgacagtaacacaatgacaccagtccacaacacctgggcaagtgtctggcttgctggataaactgcacttcccctttccctttgctatatggagagctgcatcaatctgggctttcaggcattggtctccttctaatgaggggaatcgaccacacagctccagcatgaccatgctcacctatcccagcaaataggtgtttatccccagtgaaacccagcacagaacacccttaggagtaaaattagattttggtgcatgaatgttattgacaaaaaagactccctgctcaatgccactcggggacatgagtctgaatgtccctgccatggcccaggggaatgatgtctgtatcaccaaaccagtgctggcacctggaccttgtcaccactgacagggctgagaggaggtcagctgccggctgctgtacccggaacaggtttctagggatcaggcagaggcaagaggctggggaagcagcttgccttgccagctcaccaggctgctctggagagaaatagagggcttctatctctattactgtcagagtctggcacttctccccggctctgaaattcacagcaatggatggaggagggaggagggagaaggaaggaggtgcaagccagacaatcaaaacagccacaatattttggaagtggaatattccagctagagaaaattctctaaagcattgagcagtagggctggaagaggccctagctaatccagcactctggttttgtagaggaaatagttgagaggcagaaagacaaagcaacttctctgaggttacaaggtcagtaaggggcagaactgggacaaggctctgggtcttcggtgctttcaccacttaaaagaaagcttttgctttcttcctttataaaaccagagattggcagggggcttccttttgtgggaaccccagtggagacagaggatgtttacctgcagggaagaggggccagggcccggctgtgcctggacccagagtggtggggaaggggggtatgctcataccttgcaggttgacgccccggggcaccacgccctgaagctccactgtgggcaggtcatcttccgctgcattagagttattgggtggaactgctcttctgcctccaaaggcggtcctggaagtttctgacatttttgactttacaaggtccttcagaaaaaaaaaaaaaaagaagacaacagaaaaggcatgtaaagtgagtaacatttgagacaaggattccaaaatagagaaacagatatatctgtgtgtgatagcacttgagcaacacattttgccgtttgcataaataaaaactgagaagtggcagcaaggattagtctaatgatggaatacagttccccaaggatcttggggagatttttgtatgtgtcaaaacatatggaaagcagaagaaaaggggcttattcaaagaaatttaaaaattaaaagatttttggagacccagattcccccaccctccataatcctacagcagcatcttcgcaagaaatgtttcctgttatatgcatgtgctgtatctatgttcatttcatacagatttatgagattataagtcacttttaagaataaacgcacacaaccatgtccagacaaatgttgtcttctaaagcgtttacatttgcaatttaattcaaccaatatttattgagggcctatgacatgccaggctgtgatctaggtacatgggatacatcagagaacaaaacagaatgtttgctctgatagattatagtctgatagggttagggtggagcccaagaagagccataagtaaatccacttaggggtgaggaggtaggaactgctttggaaattgagccacatggaggaggataaggaggtggagaggttgggcatgcaattttcaatagggctatcaataggcttaagaagtcagggttgccaacatttcccattccccaagcctgcttccccttcccttggagcttgtgcaggcactgagccagtttaaacaacacacacctgacggtcagtgcccagtaagtacttgttgaccaaatgaccaaatgaagggggactttgtttctgggcccagtgaaggttcccccttgatcccctggattacccagtcatgactcctggagacttggctattttcaaaaaccaggcacacccacaagaggtgaagagtccccattatagaggccaccagagtagagagatggttccagagacatgtggagcactaacaacatgctggagaaaagacaaccacgcctaaggtgtctggtctgagaaggagacaggagtgtttggatgcataaggtgtgaatgggtatccataagtatagataaatatatttacagtcattggtgagctgacgggggaagggagggagaagagcgaaaaagggttaatgatagggagaaggctgcgagagccatcctctagtgagaaataccgaaggtaggctgcggcattgccaggggtgcagaacagtgtggcgcgctgtcgggagacacagtgctaagggggagaaggggggagccccaggtgcacgcctggctgggtgagtgcggcgggcaggagccctcgcttctgggcgggtctaaggaggagaagtggctcgagttcagctccaaattgggacggaggcaggcgatgcgcaggagtggggaggcgcgcaggagtggggagccaagccggcggggttccagtctagcaggctgttctcacttggccccactccctccaccttttgtgttccagctccataatctgctccctgaggaaagggggctcgtcccttggggaagcacctccaactcccccatccccatttggtggcattctaagcaagcaacggcttcgggagagctgcctcgagagcctgagagaagtcccgcttagaagctgggctgggcaggtgcggagttgggggcgggaagccaggattgggcaagtggagctgcctgtgaccggcgccacagggcccagagcaagccgcttgctggttcaaccaggaaaccgaggtgcagaaggtggacgcagcgggccctggctcatagggtgcaggggcggtggcttacctgcaggcgctcccctccagaggtgccctcgcgtgggcttgctctgtgcgcctcggggacttcctcaaacggactcgggaaagacaagacagttggctcttaaataacttcctaagaggagccctcaccctcctcccctgtcccacagggttttctcctcccccttctccacagctggagccagtaggggagctcagaggattttctatttacttcatctggcctgttatcccggcaggtgcgcccttctctcccacttgcccctctgactcccaatttcccattcccacttctcctccccatccccacccctagatctgccctccccaccgcaaccagttgctgggagtaccaggcaaggggccctgcagtgccaggaagtccccacccgtcccctttggtcagagggtctgggagggtttcctttacaaaggaatgcttttgcctggcaggtcagctgctactgtggcttggcaggaggggggtctgccctcccacagacaggtcacacagacagttgtgaccatgcatgcagtgagagcaacgtgtccctcctgtgcaaataaggcatggtctgcattcctgaatcatcccagagccacagccaccgcctaaccacaagacttcctgcaggaatgggatgcctagccccaaggaagatgagtaaacatctttaataatgccatgcagattagaaaataacacttggttttctctgaaaatcattttagtgcatgttcaaaaattagaaaattttccccctaaaattttaatttttttcttttactctttctttctttctttctttctttctttcatctttctatctttcagatgaagtcttgctctgttgcaaaggctggagtgcaacctccacctcccgggttcaagtggttcttctgcctcagcctcccaagtagctggaactacaggtgcatgccaccatgcccgcctaatttttgtatttttagtagagatggggctttaccatgttggccaggctggtctcgaacttctgacctcaggtgatccaccctccttggcttcccaaagtgttgggattacaggcgtgagccaccgcacccagtcaaacatggctatttctaaccttctttactgtcttcaaatttctgaccctgccactcaatctcccaatgttataaagaagaaaaaaaaagatgccattggttagaaattctctcaattttctgctaccaatctatgaacctgcctgcaaccttatctatcttttcctctttcttcttgttactgaagttggaaaggtccctcctccctctgcatctccaaaccaggcttctgcgttgccttgttctccggggctttgctgtgactcttacgtactcttcctcttgcagcttcaagctcctgcttgctaatagtgggtcttctcagcattcatgcaatttcaggtctcttcagtatttttttaaaaacctcccccaacctatgtccccactcctgctgttactcctcctctcctccccttcatcactaagtatctgccatctggcttccgcctcatcattctactgaaagtggaggtcacggtctccaaggcctgtgctcaggccaaaagacaggattcagttcttatttacctgaccttttggaagcattgaactctgtctttgaaggtatttttcctaggcctccttgacattgaacactctgtggtttcctccagtgcagcgcaatattccttgattgtctgaggaactcccatagttttcaaattccatctatatcctgacacctcccaaatctgggtctttagccaagatcttttccagaattgcagattcccgtatctaagtgcctactggctatcctcatttgtcacatcccagtgacaacacacgctcatcatgtctaacatgagatgtatcactttcctggaaaacctggtgcatctcaggagttccctacctcaatgaataccatcactttgcacgcaggtggtacaccagacacatgggcatcattcttgaggcttccttgtttctctccctcaatcatcaaatccgatccttgagcaaatattttctatcctacctcttaaacagcccttgaatctacccgtgtatgtacccctttccagtccattctctacagtgcagtcagaatgagcatttcagggctaaaatccgaaatcaaattatttgcacaaagcccttatatggctacttctctttgctttttggataaattgcaagctgaaactgacaaggcctatacaagctggaccctgcctctagcactgctctttccctcagcatccatacaatttgaggtctccagtatttttaaaaaaccttcccccaacaccaatctaccctccctgccttccactgttgtttctcctctcctcctcttcatcactaagcttctgccatttggcttccatctttcttccctatcatcttcctctgccatctttcttccctgcccagtctccctccactgactccccagttgtcttgcaaggagtttgccttgttgtagtgctcctcacactgcatgatcattttctgtttccttggctgtacctgcactagagtacaaaaaggtagggactccagccagagttccctggagagaggctgctgaccacttaactatccaaaggccgtctttgccacatcccttgctgagtgctagagaaagaccctaaagatgtctagcactgcttcccctcagcattcatacaatttcaggtctcctcagtattttttaaaccctcccccaatccttaacgatcatattctggtagttctcctggcaaacatcaaatctgagtgtctagaattccaagataccctcatccatgtggggttggaggatgagcagccacccttgcacccttcagatgaggttacgcagatgccaggtacccctgggacttggggttgagttgtgcattcagaacaggattgtcaccctcacaaccacctccacggtgtcacttttggccttagactaattattggctttgtgaacatacacacacagtggttggctttctgactcccccaaaccactaacctcaagagcatcataaatgcaatggctttccttgtgctaaacaaagtcgataaaaatgtgtctaagccaccaagccctagaatgcggttgaagcccattcattttacagggtattcctcatggttatatggctgagacatcagaacaaaggtttctggtcacacagtgaatcttgaactgtgctagggatgcaacttccacaggtgcataggctctgaggtccttaaggatgggatggtgtcttttatttctgaatgccccctgcctggcatggaagtggagccatgtaaatatttaaggcatgtaacagacggggttcatccaggaaaacaaaaaccactttaggtctttctaaaagaaggaatttaaggcaggggattggttacacaggtgagagaagagacaagaaaccaaacacgagaaggtgaatcaactccacaattagcaacagcagagaggagttggtgtcgttgtagcgggaggactgagggtaggtcaggcactggaaccgtgtggtcctgtctggtgggagctttagatcccataattccaagaaacactgtctgaggtcaagagggagggaagaatgatcctagcttgtccctttcttcccgctccctctccctcccttgtctgccgttttgctgaactccactagaatcagttgacaaaggactctggaaaataccgcctgcaaagttagccccaccactcctgtgctggggccccaaggctacccccaggttctgtgattcactaggaggactcaccagactcggccacccacgtagctatgatcagatacaaatgtacatatatcatatatactacacgataaatcatgacgaaaagatacaaatccaaatcagcagagaaaaggcacttgggcaaagtctggaggaccaggcagaagttcccaaaggtcctgtcctaatcaaggcacatgggctgtgcctaccaaccctggcaatgagttgtgacaacactgatataatgtcatctgccagggatgctcaccagaggctcagtgctcagggtgtttatggggggctggtcacataggtaccctctacctagctcatagccattttccagactccctgaaggaagcaggtgttaagcatgagccacaatttttgtacagtttaggcccagccagccccacttgtcagttagggaacagtgggaagactcctgaagtccaagttcccagatgccagacaagggccaagcttgcaagtagggctttctaagccagtttcaggtttgctatgttaactctttactgcatccatacagggaaagggtgaggaaaggctctctgggcaaacagttccaggactgccacaacacactgtgctctttcatcatggcatggccagtccctcacatgagatgtcaataggcctggagcacgaggagactccaatgagaacgtcacaagggtaatccagttctgcccctactttcttggccttaccagctcagcatgagacctccaaggagacgtgaactccctctggctgcacgggcctgggcataccttctcactcttctgaagctgaagggctcaccccattgcctccccaagaagcagggtaaaaattcctaaacacatcactctgggatcctggcgtctctcagaaatatgtagtaaactttgggagttgtgagtaaacagaaaatacgtgggaggagggattccggatccccttaccttgatcctttaattctgagttttcatttctatggtattgacacttttctctgcagtctctccagacaaaccatctttctcctacttggcaatacccaaggagcagaccatatttgttcaggcaatgaattttctggcaaactctatttgatttacatgcaaaacttcacatctcaaacaaacaaacaaaaaacccagtcatgtctggacgctgctggttttttccagctgaacaagacctggattttgttggttatagatgtaattccagagggaggtgagtagatacataaataacaactggccttgttcaaagatgccagaccctctgacatgaatgacccaagttcgtctcttgggagagtctttctcctgcactgcccttcatcctgtaggagctggagaaaactttccactccagatggaagtgtcctgggggagaggatggaagggaggctgggtgggcagtttgtagtcaggttctagccacagtagtgagcagtgggggaaggcaagcggccctctgtatccattcacatatttttcaaagcctcacgagcgttttcacaaagtctggcaatgacattttaaaaggaatttataaagcatcatcgcagttgccaccacaatagggcgtgggatctaagacaggaccatgtctcccacagcctcttttccttcttctttcaggaaagatgaaaacccatgccagggacaggtgcagatggcaggagttttctctttgctttggcttccctgggcatagcccactcttgccagggatctacgatcacctgtaatctaccttcccgaggagcagtgatggattgctgggggctgcctcacctcatggcaggcaaatggaagaaagctgttctcgccttaggaaagaaagatttaactaatgtacccaccttcttacagtaaatatctctgtcttaaaaaaaattttaattgtggtaaaatacacataaaatttataatcttaaccatttttcagtttacaattcagtagtgttaaggctattcatggtattgtatgacccatctccagaatgtttctgtcttgcaaaactgaaactctgtttccattaaacaactccctgtgaatatgtgtgtctgtgtgtgtctggctatatatttgtgagtgtatatgtctgtctgcatgtgactgtgcacacatctgtgtgagcgactgagtgtgtctgagtatctgtgtgtatgggtatttctgagcatgtatgcctctgtgtgtatgcattgtctatgtgagtgtatgtgtctgtgagtgtgtgcacatctgtgtgagcaagtgtgccgtgcatatgagcgagtatgcaggtggaagggaaggactgaggaagcactgagggtttagctccagaaaactttctccactggcttcctaactcctccagagtcctgatggagtttaaggagactccaagagatttttaaacttgaaaagactttataaaacatgacgaagggtcaactagaagtaggtctgttacagataacgatttttcaagtttaaaggaaagaaatttcataaaaaatgaaaaattcataaaaaaagaaaatttcataaaaaatgctagaaacacccacagtgggaagagacatcagtcatgccagcctcactgcatatgacacagatgcatgcatggtttaattcaatacttttccttaagtgaagcaagagaccccacatccacccatcccaagtatctcactttgccagaggaaaaattcaatgataacaaaacattatgaaaaaattagtaattaaaataatacagcaatgtgtatgaacaaaataatcaatgaaagtgaaacctaatagtaattccacaaacttattacaaagctattaatttaaagagtagtggcaattgaaaaccacaaccaacaccagataatggggatgctataaaaacaatgcttgcttcagtaaaactatcagaatgctgactaaatgtgtatgcacatatgtgtgcatgtgtgtgtgtgtgtgtgtgtacaagtacagtaggagctttggagtgttcccaagagtaatatggcagctggagttagaatctactatctatgtaaccttgggcacattacttaacctcacctgtaaaatggtgatcctaataatgtatacctcacaagattatgaagatcaaagaagagaatacctataaaaaggtttgtatagtccctggcaagaagctagctctaaataaatattaccagtaatggtatgtgtgcactggacaaccttcactcatccatgatgaatattttaactttttgtaatagttattacctgtattttctcattatcatcctcatatcagggaagtgaatatttaagttgctaataattttggataatttgaagaggccattatcagcatttattgcagtattttctgtctagaacctcttcaagagcttcatgtgcaattcatgcttgtcaaggggtgagatttataattggctggttgtggttgtatatgtgaggatatgtatatgtgaggatatgtatatgtaagggtctatttctcttgctctgtcacccaggcaggagtgcagtggcgcgatctcagctcactgcaagctctgcctcccgggttcacgccattctcctgcctcagcctcctgagtagctgggattacaggtgcccgccaccacgcccggctaatttttgtatttttagtagagacggggtttcaccgtgttagccaggatggtctcaatctcctcgtgatccgctcgcctcagcctccgaaagtgctgggattataggcgtgagccaccgcgcccagccaatgccttccatttttaagctatataagaaagatgtctggggagtgggtcagagactgattttatttgatatataccaagtgaaggcaccagcttccacatggttgccagtgaagggaccagcttccacatgttgccagttctttctggaagcccacatccaggtaggcttcctgggcagacccacgggcatctcaccaaactcttctaatgaggtctgtggctatgggtcagcagggtgcccctgtcttgggcactcttgcccaagagtgccgctgccctctgttgtagtcgcacaactgcaccttcttgctgatgaggtgaagcactaacacaaggccagaaatggaagggacatgatgtcagctggagtcttcctaacagcagaacttctggataatgatctatgaatttctaaggaaagccaaaggccattgcataatcgcatgtgtgggtgctaaaacagccaaataaaggggcaagttctcctttctttgatgctccctcagcaatttctgcagtgaagtttcagataactgtgccagagcccttcctgtgaaagtgtttcttgttaatgcatttctcctctcacaatggtaactataagtggttaaaatagcatcagaaacactaactctatcatatggacatatatcatgattcactaaaaatatttcccacaatgcagttttaacttaaacaaaagttgtttatatatacgtgtgtgtgtgcatgtgtgtattaataaatatagacagtgtaacttacccagaagagttccttatgcctatgttctgaaaaagacagcacagatgcccaaaaatataagaaattttataaggggcttttagtggtccaagattctcctgctggcttctatgagtgataatgatctagaattcttcgaaaagccaaaaagaagtcttccaacagccatgacttaataaagtccattgtccctgattattcaaactccttctgattgttccatctgatttcatgatcacaaagcctatgaaaactttctgttctgggaaacagaatcaataatgttttataagcttaactgtgtgatatgatgtgatattgtgttttatggaattggacatggcctatgtctctactatattttcaccttgtatgcaacctcctgggataccattacatatatatatatatatgtgtatacacacacacacatatatatatacacaaatacatatatatacacatatatgtgtgtgtgtgtatatctgctatatacatatatatgctatatatatatacacacacacatattatagctaggtatggctttatgtagtactttcttaaacattcaccctcaaacctgaagggttctttaatgattgtgttcatttattcatttgggattagctagtttccaaggatggatcaaccatccatgcctcccggtattcccagccatgtgtagtccccttccacagtgaatctggcttcaaccaacagggtgcagtggaagtggccctatgccagttctccacctaagctatatgatgtcctaacagctgccttttcatgcttttagaacccttaaccaacattaagaagtctagctacactcctggagtccagctaacatggagaaaccatacagagaggccacatggagcggtggggacatgagaatgtgcagggagggagaggagtccagctgcctcataatcctaccggagcccaggcatcagccatctctgccaacctgcagcacgagtgaggacgcgagtgtgccacctggcaagtggatcctctggccccagtcaaggagctgcagctgatggtgcatggagcagagagaaactgccctgctgagccctgccaaaatcataaaattgtgagcaatgaaacaaagtggctgttattttaatccactaatatttgggatagtgtgttacatcgcaatagataactgagacacattcatcaaataaatatttatctaacctgctgtttataataataatacaacactaatattgagtatgctgtaatatatagcaatataattaatatggtaatatttatctatctattattgacagactttgtgatgagtaggaaattgtatctatctttaaggcctgcagtcaagaaggggaaactatattaaaagctagtgttttggaatttcgtcaacaagtctgtttccacgatttaatagacttcaaaatattctgtgttttcctcctataacaaatatgttccttgtggacctaatctggcatataatatatgtacaaaaatacaagttaattaatgaattaaagtcagtggaatctcttatgtcagtgaaagcaatagggttgctgacaaaaaaagaaagtaaaagtttttagtgaattgtatatgcaccactggtttttatttcacctttatcttaaacagtcagccactcacttaaactttggcttctgaggctgagagccacataaaagggagc

SEQ ID NO: 95 - DNA, 31394 bp, Homo sapiens
  misc_feature (1)...(31394): n = A,T,C or G
tgcacacaaaactctctacactgctagtctttaattctcaaaaacagttccctgagagagggaacataattgcctctattttacagatgacaaaaccaggcttagaagttacacaaattgccttgcacagtggctcacacctataatcccacacattgggaggctgaggcaggaggattgagttagaaaccagcctggtcaacatagcaagacccccatctctacaaaagaaaagataaatttgctgggcatagtggtgcacacctatactcctgcttgggaggctgaggcaggaggatcgcttgagcccaggaggtcgaggctacagtgatccatgatcgcaccattgcactccagcctgggcgacagagcgaggccctatcgcttagaaaacaaaaagttacatgaagttcccccaaggtcccgtagctagcatgtgatgtggcagggagagagcctgtccgcttcactctctcacatgggaccagaaaggggtgatgctgtgcgtggacaggacatctggcaagtggtgtgtccaggacacaggaagcagcgtagtggccaagctgcctccagctgtcacatctgtgtgtctctgcagtaaggatgagtctgccttcatggtccacccgctgacggcacagggagtggccgtggtaatagtggcttacggcatcgcccccaaaggtaataggagtggttgctgcaggtccgagggccggtgggctttaggaggaagtgcatccctgacccagctcatgctctctgtgcaggcaccctggaccacatggtagaccaggtgacccgcagcgttgcgtttgtccagaagcggtatccaagcaacaagtgggtgttgccagtagattttcttcctgttggacctcagtgggtgggaggacagtgcaatcagtacctaggatacagccaagctgcccctctggcctgtggagcagaaagcaaattgggactcttcgaagggggcctgatgttgtggggaaactgcgtgcaaatccagctctctgctctgacccctcccaggggaatttacctgtgtggacactcagccggggcccacctggctgccatgatgctcctggccgactggaccaagcatggggtcacgcccaacctcagaggtttccatgggagctacagcctggctgggcaaccttcatctccccatgagccttggggtttgggccaactgcttgaaatcctcccggccatgagtggcttgaccgcagggcttcgagccctctgagcaaggccttctctgcctcctctgtgccccttcccctggtcctgcccctctggcggtgggggtgggctggccctgccttgctccgcctggagcctggccctgtgacaattctgtaccttcacaggctttttcctggtgagtggggtctttgacctggagcccatcgtgtatacttcacagaacgttgctctccagctgaccctgtgagttacttggccaccacctcccctggctcaccaggagcctggctcctctctgtcctgacccctgtccactccccaccccagggaggacgctcagaggaatagcccccagctgaaggtggcccaggcacagccggtggaccccacctgccgtgtgctggtggtcgtgggccagttcgactcccccgaattccaccgacagtcctgggagttttaccaggtactcccagtgcaggtttgtggccagaggtcgagggtcatgtgggctcattattttcctctttcttttacccaagtggacaagaccctccatcatttatttaacacgtactgagtgaaccctgacctgtgccaggcatggccccatgtcctgccccacctcccctcccactgctcaggcccctcttcccatgtctcccctgcccagaccctgtgtcaaggagagtggaaagcctcatttgaagagctccacgatgtggaccactttgaaattgttgagaatctgacccagaaggacaacgtgctcacccaggtggggcctcatccctggcagccctttcatggtagacagcacaggtcctgtcgcagccccttagatgtgcaaaccaggagttcaagaccagcctggccaacatggagaaactccgtgtctactaaaaatacaaaacaaattagccagatgtgatggtacgtgcctgtaatcccagctactcaggaggctgaggcatgagaattgctttaacccaggaggcagagattgcagtgagccaagattgcaccactgcactccggcctgagcgacagagtataagactctgtctcaaaaaaaaaaagacctgagaacctaggaaagaaagaacctaagaaagaccatcttgtttctttctttttttttttctttagagacagggtctcctctcttgcacccaggctggagtatagtggcaaaatcttagctctctgctgcctcctgggctcaagtggttatcctgccccagcctcttgagtagctgggactacaaaggcgtgccactgtgccctgctaattattcaatgtttttgtagagatggggtctctctatgttccccaggctggtcgtcgtcgtcttccttcttcttcctccttcctccttcatcttctttcttctcctcctccccctacccccccttcttcttcttcttccttcatctcagcatattatacctctaaccagactgtcttcaactcctgagttcaagtgatcttcccacctcagcctcccgaagggttggggttgcagacgtgagccactgcatccagccctgtctcatttccttaatcaaattcctgcaaagagctgctctgattctggggcttttgtgtcttctcttcctgttccagattatcttgaaaacaatcttccagtagttctgacgatacttggagcctggtccacgtgcatcccaccttgggaagcctctccaaagagctttcggagctgacactgacagcttcagtttcccccagcacccaggagagccttgctgtgtctgtctgcccggcaagagtccattctcactgctgggacactcatgaaaatctccacgtcctccctcttcccagcctggatggagctccagggctggggaacgtccgcaagtcaatgctcagagatgcccggagctgcctcttagactcgtctggcccatctacctgctgacagagcatgacaaagatgacgctcaaaagtaatgccattacttcttttttttttttttttttttttttttttgagaaggagtcttactctgtcacccaggctggagtgcaggggcgtgatcttggctcactgcaacctccacctcccggggtcaagctattctccttcttcagcctcctgagcctttgggactgggggcgcctgccatcatgcctggctaatttttgtttttttaggggagacgggggttcaacctattggccaggctggtctcaaactcctaaccttgtgattcgcccgccttggcctcccaaagtgctgggattccaggcgtgagccactgcgcccggccagaatggcattatatttaaatagttcataaagaagcacaaaagaatattatttcataacatgtaaaaattatataaaacgtaaatttccatgttgataaataaagttgtattggaacacggccctgctcgttcatttacgtattgtctagggcagctttcaagctgcagggtggagctgagtggtggtgacagtgacctcctggcccgtagtgcctgaagcatttcctatctggcccttttcaggaaaagtttgcggacccctgggtaagggcttccccaagccagctaccctctgccttctgcttcagtctcctgtctgctctgtcctccatctccctgacatttgggtctgtccctgaatgccccggggtctcagcgttggggccaacaccttgaccttgacaggacaatgctacccacatgtaggacaagcttcctctgcacccgagagtggtgtgcatgtcccaagaagccagctatatccatccaccacccaccccaccacaccgcctctttctctcacaccgaatagcattcaagaatttccactgtgggctgggcgcaggggctagtgcctgtaatcccagcactttaggaggccgaggtgggcgaatcacctgaggtcaggagttcaagaccagcctggccaacatggcaaaaccctgtctctactaaaaatacaaaaattagccaggcgtggtggctggcgcctgtaatcctagatacgtgggaggctgagttaggagaatctcttgaatccgggaggcagaggttgcagtgagctgagattgtgcccctgcactccagcctgggtgacaaagccagactccatctcaaagaaaaaaaaaaaaattccactgtatgtgtgcagcaaaccatcatgacacacatttacctgtgtaacaaacctgcacatcctacacatataccctggaacttaaagtaaaagttgggggggggggtaaaaaagaatttccaccgtgacattattgagtatagcaaaaaaaaaaaaaacaagaaacagcctagtgttcattagggaataaacgcattcaagcagcatcaaaccctgcagccattacaaagagatctatgttgaccatgtggaatatctccaagagccacagtagcctcccttatctgtaggattcactccaagaccctctgaaaccatggataatactgaaccctatatacactatgttttttcttgtatatacatacctacgataaagtttaatttataaattggcaaagggtatataaatattccttctaagagattaacaataactaataaagtagaacgattaaaacaatatactgtgatcaaagttatgtgaagccaggtgctgtggctcatgcctgtaatcccagcactttgggaggctgagacaggtggatcacctgaggtcaggagttggagaccagcctggccaacatgacaaaaccccgtctctactaaagataaaaaaaattagccgggcatggtgacacatgcctgtaatcccagctacttgggaggctgaggcaggagaatcgcttgaacctgggaggcggaggttgcagtgagctaagatcacaccattgcactccagcctgggcaacaagagtgaaactctgtctcaaaacaaaacaaaacaaaacnnnnnnnnnnnnnnnnnnnnnnnnnnnnnnnnnnnnnnnnnnnnnnnnnnnnnnnnnnnnnnnnnnnnnnnnnnnnnnnnnnnnnnnnnnnnnnnnnnnnnnnnnnnnnnnnnnnnnnnnnnnnnnnnnnnnnnnnnnnnnnnacttcatctcaaaaaaaaaaaaagaaaaaagaagtccagaaacccgcggagacactatcacactatcccccccaggctggtagtgcagtggcccaatcatggctcactgcagcctcgacctcccaggatcaagtgatccttccacctcagcctcccgagtagctggaagtataggtgcacgcccgactgattttttttttttttttttagacggagtctcactcttgttgctctggctggagtgcaatggcaggatctcggctcactgcaacctctgcctcttagattcaagcgattctcgtgcctcagcctcccgagtagctgggattacaggtgcccaccaccatgcccggataattttttgtatttttaatagagacagggtttcaccatattggtcaggctggtctcaaactcctgacctcaggtgatccacctgcctcagcctcccaaactgctgggattacaggcgtgagccaccgggcatggcctttcctggctaattttttaaatttttgatagagatggggtctcagtgttgcccaggctgatcttgaactcctagattcaagtgatcctccctccttggtctcccaaagtgctgagattacaggcgtgagccaccgccccgggctggaaaatacttttttaaacgagggcaatgtgaatctgaaatgccatttgaggaaagatctgttcgcctgacatcctgtttgagcctgggtggacaggacagcacctgccagcatcgggaagcactgcagatgggaagaggcttggtcactctccaaaggtggcaggagttggagggggtgagctgaaggtaaggagaaaggaggtggggacccaggagacaggggctgcgcagcgggctcggggctgacacccccacggatacagttcactggggctcaaacataaaaggaacccaactattgtgggaggaaaagactcttctgcctttctgccttttctttttttctttttctttctttctttttttttttttttttttgagacagagtcttgctctatcgcccaggctggagtgcagtggcgtgatctcggctcactgcaagctctgcctcccgggatcacgccattctcctgcctcaacctcccgagcagctgggactacaggcgcctgccaccacacccggctatttttttgtattttttagtagagatggggtttcaccatgttagccaggacggtctcgatctcctgaccttgtgatccgcccgcctcggcctcccaaagtgctgggattacaggcgtgagccaccgcgcctggctcttttttctttctttttttttttccgagacagagtttcactcttgttgcccaggctggagtgcagtggcgcgatcttggctcactgcaacctccacctccagggttcaagcgattctcctgcctcagcctcctgagtagctgggactgcaggcgcgcaccaccacgcctggctaatttttgtatttttagtagagacagggtttcaccatattggccaggctggtctcgaactcctgaccttgtgatctgcccacctcagcctcccaaagtcctgggattacaggcgtgagccaccgtgcccagcctgacccctctgccctttcaaaaactatgttcgttctctcacagccttctcttgtcatattaagtccacaccgcaggcctaatttgtccagtgaatgctatgcaaatatttcatgcacctgctgatcgcaggaatgatatgtacttggtacgcactgatcgtacctcggggtgggagaagagagggcaaggaagcaaagaatagccccctcctttcctggtgcaccttcagatgtgccgatggggcccaggctcgctgcagatggcccccttcccagagacaggggaggatcctccacccactccccagcctccaggaccatcctgactcctgccttcaggcactcaagttatgcgtctagacatgcggatatattcaagctgggcacagcacagcagccccaccccaggcagcttgaaatcagagctggggtccaaagggaccacaccccgagggactgtgtgggggtcggggcacacaggccactgcttccccccgtctttctcagccattcctgaagtcagcctcactctgcttctcagggatttcaaatgtgcagagactctggcacttttgtagaagccccttctggtcctaacttacacctggatgctgtggggctgcagctgctgctcgggctcgggaggatgctgggggcccggtgcccatgagcttttgaagctcctggaactcggttttgagggtgttcaggtccaggtggacacctgggctgtccttgtccatgcatttgatgacattgtgtgcagaagtgaaaaggagttaggccgggcatgctggcttatgcctgtaatcccagcactttgggaggctgaggcgggtggatcacgaggtcaggagttcaataccagcctggccaagatggtgaaaccccgtctctactaaaaatacaaaaaaattagccgggcatggtggcgggcgcatgtaatcccagctactgggggggctgaggcagagaattgctggaacccaggagatggaggttgcagtgagccaagattgtgccactgcactgcactccagcctggcgacagagcaagactctgtctcaaaaaaaaaaaaaaaaagtgaaaaggagttgttcctttcctccctcctgagggcaggcaactgctgcggttgccagtggaggtggtgcgtccttggtctgtgcctgggggccaccccagcagaggccatggtggtgccagggcccggttagcgagccaatcagcaggacccaggggcgacctgccaaagtcaactggatttgataactgcagcgaagttaagtttcctgattttgatgattgtgttgtggttgtgtaagagaatgaagtatttcggggtagtatggtaatgccttcaacttacaaacggttcaggtaaaccacccatatacatacatatacatgcatgtgatatatacacatacagggatgtgtgtgtgttcacatatatgaggggagagagactaggggagagaaagtaggttggggagagggagagagaaaggaaaacaggagacagcgagagagcggggagtagagagagggaaggggtaagagagggagaggaggagagaaagggaggaagaagcagagagtgaatgttaaaggaaataggcaaaacataaacagaaaatctgggtgaagggtatatgagtattctttgtactattcttgcaattatcttttatttaaattgacatcgggccgggcgcagtggctcacatctgtaatcccagcactttgggaggccgaggcaggcagatcacttgaggtcaggagtttgagaccagcctggcaaacatggtgaaaccccatctctactaaaaatacaaaaattagcctggtgtggtggtgcatgcctttaatctcagctactcgggaggctgaggcaggagaatcgcttgaacccgtggcggggaggaggttgcagtgagctgagatcatgccactgcactccagcctgggcgatagagcgagactcagtttcaaataaataaataaacatcaaaataaaaagttactgtattaaagaatgggggcggggtgggaggggtggggagaggttgcaaaaataaataaataaataaataaaccccaaaatgaaaaagacagtggaggcaccaggcctgcgtggggctggagggctaataaggccaggcctcttatctctggccatagaaccagagaagtgagtggatgtgatgcccagctccagaagtgactccagaacaccctgttccaaagcagaggacacactgattttttttttaataggctgcaggacttactgttggtgggacgccctgctttgcgaagggaaaggaggagtttgccctgagcacaggcccccaccctccactgggctttccccagctcccttgtcttcttatcacggtagtggcccagtccctggcccctgactccagaaggtggccctcctggaaacccaggtcgtgcagtcaacgatgtactcgccgggacagcgatgtctgctgcactccatccctcccctgttcatttgtccttcatgcccgtctggagtagatgctttttgcagaggtggcaccctgtaaagctctcctgtctgactttttttttttttttagactgagttttgctcttgttgcctaggctggagtgcaatggcacaatctcagctcactgcaccctctgcctcccgggttcaagcgattctcctgcctcagcctcccgagtagttgggattacaggcatgcaccaccacgcccagctaatttttgtatttttagtagagacaaggtttcaccgtgatggccaggctggtcttgaactccaggactcaagtgatgctcctgcctaggcctctcaaagtgttgggattacaggcgtgagccactgcacccggcctgcacgcgttctttgaaagcagtcgagggggcgctaggtgtgggcagggacgagctggcgcggcgtcgctgggtgcaccgcgaccacgggcagagccacgcggcgggaggactacaactcccggcacaccccgcgccgccccgcctctactcccagaaggccgcggggggtggaccgcctaagagggcgtgcgctcccgacatgccccgcggcgcgccattaaccgccagatttgaatcgcgggacccgttggcagaggtggcggcggcggcatgggtgccccgacgttgccccctgcctggcagccctttctcaaggaccaccgcatctctacattcaagaactggcccttcttggagggctgcgcctgcaccccggagcgggtgagactgcccggcctcctggggtcccccacgcccgccttgccctgtccctagcgaggccactgtgactgggcctcgggggtacaagccgccctcccctccccgtcctgtccccagcgaggccactgtggctgggccccttgggtccaggccggcctcccctccctgctttgtccccatcgaggcctttgtggctgggcctcggggttccgggctgccacgtccactcacgagctgtgctgtcccttgcagatggccgaggctggcttcatccactgccccactgagaacgagccagacttggcccagtgtttcttctgcttcaaggagctggaaggctgggagccagatgacgaccccatgtaagtcttctctggccagcctcgatgggctttgttttgaactgagttgtcaaaagatttgagttgcaaagacacttagtatgggagggttgctttccaccctcattgcttcttaaacagctgttgtgaacggatacctctctatatgctggtgccttggtgatgcttacaacctaattaaatctcatttgaccaaaatgccttggggtggacgtaagatgcctgatgcctttcatgttcaacagaatacatcagcagaccctgttgttgtgaactcccaggaacgtccaagtgctttttttgagattttttaaaaaacagtttaattgaaatataacctacacagcacaaaaattaccctttgaaagtgtgcacttcacactttcggaggctgaggcgggcggatcacctgaggtcaggagttcaagacctgcctggccaacttggcgaaaccccgtctctactaaaaatacaaaaattagccgggcatggtagcgcacgcccgtaatcccagctactcgggaggctaaggcaggagaatcgcttgaacctgggaggcggaggttgcagtgagccgagattgtgccaatgcactccagcctcggcgacagagcgagactccgtcataaaaataaaaaattgaaaaaaaaaaaagaaagaaagcatatacttcagtgttgttctggatttttttcttcaagatgcctagttaatgacaatgaaattctgtactcggatggtatctgtctttccacactgtaatgccatattcttttctcacctttttttctgtcggattcagttgcttccacagctttaatttttttcccctggagaatcaccccagttgtttttctttttggccagaagagagtagctgttttttttcttagtatgtttgctatggtggttatactgcatccccgtaatcactgggaaaagatcagtggtattcttcttgaaaatgaataagtgttatgatattttcagattagagttacaactggctgtctttttggactttgtgtggccatgttttcattgtaatgcagttctggtaacggtgatagtcagttatacagggagactcccctagcagaaaatgagagtgtgagctagggggtcccttggggaacccggggcaataatgcccttctctgcccttaatccttacagtgggccgggcacggtggcttacgcctgtaataccagcactttgggaggccgaggcgggcggatcacgaggtcaggagatcgagaccatcttggctaatacggtgaaaccccgtctccactaaaaatacaaaaaattagccgggcgtggtggtgggcgcctgtagtcccagctactcgggaggctgaggcaggagaatggcgtgaacccaggaggcggagcttgcagtgagccgagattgcaccactgcactccagcctgggcgacagaatgagactccgtctcaaaaaaaaaaaaaaaagaaaaaaatctttacagtggattacataacaattccagtgaaatgaaattacttcaaacagttccttgagaatgttggagggatttgacatgtaattcctttggacatataccatgtaacacttttccaactaattgctaaggaagtccagataaaatagatacattagccacacagatgtggggggagatgtccacagggagagagaaggtgctaagaggtgccatatgggaatgtggcttgggcaaagcactgatgccatcaacttcagacttgacgtcttactcctgaggcagagcagggtgtgcctgtggagggcgtggggaggtggcccgtggggagtggactgccgctttaatcccttcagctgcctttccgctgttgttttgatttttctagagaggaacataaaaagcattcgtccggttgcgctttcctttctgtcaagaagcagtttgaagaattaacccttggtgaatttttgaaactggacagagaaagagccaagaacaaaattgtatgtattgggaataagaactgctcaaaccctgttcaatgtctttagcactaaactacctagtccctcaaagggactctgtgttttcctcaggaagcattttttttttttttctgagatagagtttcactcttgttgcccaggctggagtgcaatggtgcaatcttggctcactgcaacctctgcctctcgggttcaagtgattctcctgcctcagcctcccaagtaactgggattacagggaagtgccaccacacccagctaatttttgtatttttagtagagatggggtttcaccacattgcccaggctggtcttgaactcctgacctcgtgattcgcccaccttggcctcccaaagtgctgggattacaggcgtgaaccaccacgcctggcttttttttttttgttctgagacacagtttcactctgttacccaggctggagtggggtggcctgatctcggatcactgcaacctccgcctcctgggctcaagtgatttgcctgcttcagcctcccaagtagccgagattacaggcatgtgccaccacacccaggtaatttttgtatttttggtagagacgaggtttcaccatgttggccaggctggtcttgaactcctgacctcaggtgatccacccgcctcagcctcccaaagtgctgagattataggtgtgagccaccacacctggcctcaggaagtatttttatttttaaatttatttatttatttgagatggagtcttgctctgtcgcccaggctagagtgcagcgacgggatctcggctcactgcaagctccgccccccaggttcaagccattctcctgcctcagcctcccgagtagctgggactacaggcgcccgccaccacacccggctaatttttttgtatttttagtagagacgggttttcaccgtgttagccaggagggtctcgatctcctgacctcgtgatctgcctgcctcggcctcccaaagtgctgggattacaggtgtgagccaccacacccggctatttttatttttttgagacagggactcactctgtcacctgggctgcagtgcagtggtacaccatagctcactgcagcctcgaactcctgagctcaagtgatcctcccacctcatcctcccaagtaattgggactacaggcgcaccccaccatgcccaccttatttatttatttatttatttatttatttattttcatagagatgagggttccctgtgttgtccaggctggtcttgaactcctgagctcaagggatccttttgcctgggcctcccaaagtgctgagattacaggcatgagccaccgtgcccagctaggaatcatttttaaagcccctaggatgtctgtgtgattttaaagctcctggagtgtggccggtataagtatataccggtataagtaaatcccacattttgtgtcagtatttactagaaacttagtcatttatctgaagttgaaatgtaactgggctttatttatttatttatttatttatttatttttaatttttttttttgagacgagtctcactttgtcacccaggctggagtgcagtggcacgatctcggctcactgcaacctctgcctcccggggtcaagcgattctcctgccttagcctcccgagtagctgggactacaggcacgcaccaccatgcctggctaatttttgtatttttagtagacggggtttcaccatgctggccaagctggtctcaaactcctgaccttgtgatctgcccgctttagcctcccagagtgctgggattacaggcatgagccaccatgcgtggtctttttaaaattttttgattttttttttttttgagacagagccttgctctgtcgcccaggctggagtgcagtggcacgatctcagctcactacaagctccgcctcccgggttcacgccattcttctgcctcagcctcctgagtagctgggactacaggtgcccaccaccacgcctggctaattttttttggtatttttattagagacaaggtttcatcatgttggccaggctggtctcaaactcctgacctcaagtgatctgcctgcctcggcctcccaaagcgctgagattacaggtgtgatctactgcaccaggcctgggcgtcatatattcttatttgctaagtctggcagccccacacagaataagtactgggggattccatatccttgtagcaaagccctgggtggagagtcaggagatgttgtagttctgtctctgccacttgcagactttgagtttaagccagtcgtgctcatgctttccttgctaaatagaggttagaccccctatcccatggtttctcaggttgcttttcagcttgaaaattgtattcctttgtagagatcagcgtaaaataattctgtccttatatgtggctttattttaatttgagacagagtgtcactcagtcgcccaggctggagtgtggtggtgcgatcttggctcactgcgacctccacctcccaggttcaagcgattctcgtgcctcaggctcccaagtagctgagattataggtgtgtgccaccaggcccagctaacttttgtatttttagtagagacagggttttgccatgttggctaagctggtctcgaactcctggcctcaagtgatctgcccgccttggcatcccaaagtgctgggattacaggtgtgaaccaccacacctggcctcaatatagtggcttttaagtgctaaggactgagattgtgttttgtcaggaagaggccagttgtgggtgaagcatgctgtgagagagcttgtcacctggttgaggttgtgggagctgcagcgtgggaactggaaagtgggctggggatcatctttttccaggtcaggggtcagccagcttttctgcagcgtgccatagaccatctcttagccctcgtgggtcagagtctctgttgcatattgtcttttgttgtttttcacaaccttttagaaacataaaaagcattcttagcccgtgggctggacaaaaaaaggccatgacgggctgtatggatttggcccagcaggcccttgcttgccaagccctgttttagacaaggagcagcttgtgtgcctggaaccatcatgggcacaggggaggagcagagtggatgtggaggtgtgagctggaaaccaggtcccagagcgctgagaaagacagagggtttttgcccttgcaaatagagcaactgaaatctgacaccatccagttccagaaagccctgaagtgctggtggacgctgcggggtgctccgctctagggttacagggatgaagatgcagtctggtagggggagtccactcacctgttggaagatgtgattaagaaaagtagactttcagggccgggcatggtggctcacgcctgtaatcccagcactttgggaggccgaggcgggtggatcacgaggtcaggagatcgagaccatcctggctaacatggtgaaaccccgtctttactaaaaatacaaaaaattagctgggcgtggtggcgggcgcctgtagtcccagctactcgggaggctgaggcaggagaatggcgtgaacctgggaggtggagcttgcagtgagccgagatcgcgccactgcactccagcctgggcgacagagcgagactccgtctcaaaaaaaaaaaaaaaagtaggctttcatgatgtgtgagctgaaggcgcagtaggcagaagtagaggcctcagtccctgcaggagacctctcggtctctatctcctgatagtcagacccagccacactggaaagaggggagacattacagcctgcaagaaaagtagggagatttaaaaactgcttggcttttattttgaactgttttttttgtttgtttgttttccccaattcagaatacagaatacttttatggatttgtttttattactttaattttgaaacaatataatcttttttttgttgtttttttgagacggggtcttactctgtcacccaggctgagtgcagtggtgtgatcttggctcacctcagcctcgaccccctgggctcaaatgattctcccacctcagcttcccaagtagctgggaccacaggtgcgtgtgttgcgctatacaaatcctgaagacaaggatgctgttgctggtgatgctggggattcccaagatcccagatttgatggcaggatgcccctgtctgctgccttgccagggtgccaggagggcgctgctgtggaagctgaggcccggccatccagggcgatgcattgggcgctgattcttgttcctgctgctgcctcggtgcttagcttttgaaacaatgaaataaattagaaccagtgtgaaaatcgatcaggaaataaatttaatgtggaaataaactgaacaacttagttcttcataagagtttacttggtaaatacttgtgatgaggacaaaacgaagcactagaaggagaggcgagttgtagacctgggtggcaggagtgttttgtttgttttctttggcagggtcttgctctgttgctcaggctggagtacagtggcgcaatcacagctcactatagcctcgacctcctggactcaagcaatcctcctgcctcagcctcccagtagctgggactacaggcgcatgccaccatgcctggctaattttaaatttttttttttctcttttttgagatggaatctcactctgtcgcccaggctggagtgcagtggcgtgatctcggctgacggcaagctccgcctcccaggttcactccattcgcctgcctcagcctcccaagtagctgggactacaggcgctgggattacaaacccaaacccaaagtgctgggattacaggcgtgagccaccgcacccggcctgttttgtctttcaatagcaagagttgtgtttgcttcgcccctacctttagtggaaaaatgtataaaatggagatattgacctccacattggggtggttaaattatagcatgtatgcaaaggagcttcgctaatttaaggcttttttgaaagagaagaaactgaataatccatgtgtgtatatatattttaaaagccatggtcatctttccatatcagtaaagctgaggctccctgggactgcagagttgtccatcacagtccattataagtgcgctgctgggccaggtgcagtggcttgtgcctgaatcccagcactttgggaggccaaggcaggaggattcattgagcccaggagttttgaggcgagcctgggcaatgtggccagacctcatctcttcaaaaaatacacaaaaaattagccaggcatggtggcacgtgcctgtagtctcagctactcaggaggctgaggtgggaggatcactttgagccttgcaggtcaaagctgcagtaagccatgatcttgccactgcattccagcctggatgacagagcgagaccctgtctctaaaaaaaaaaaaaccaaacggtgcactgttttcttttttcttatcaatttattatttttaaattaaattttcttttaataatttataaattataaatttatattaaaaaatgacaaatttttattacttatacatgaggtaaaacttaggatatataaagtacatattgaaaagtaattttttggctggcacagtggctcacacctgtaatcccagcactttgggaggccgtggcgggcagatcacatgagatcatgagttcgagaccaacctgaccaacatggagagaccccatctctactaaaaatacaaaattagccggggtggtggcgcatgcctgtaatcccagctactcgggaggctgaggcaggagaatctcttgaacccgggaggcagaggttgcggtgagccaagatcgtgcctttgcacaccagccaaggcaacaagagcgaaagtccgtctcaaaaaaaaagtaattttttttaagttaacctctgtcagcaaacaaatttaacccaataaaggtctttgttttttaatgtagtagaggagttagggtttataaaaaatatggtagggaagggggtccctggatttgctaatgtgattgtcatttgccccttaggagagagctctgttagcagaatgaaaaaattggaagccagattcagggagggactggaagcaaaagaatttctgttcgaggaagagcctgatgtttgccagggtctgtttaactggacatgaagaggaaggctctggactttcctccaggagtttcaggagaaaggtagggcagtggttaagagcagagctctgcctagactagctggggtgcctagactagctggggtgcccagactagctggggtgcctagactagctgggtactttgagtggctccttcagcctggacctcggtttcctcacctgtatagtagagatatgggagcacccagcgcaggatcactgtgaacataaatcagttaatggaggaagcaggtagagtggtgctgggtgcataccaagcactccgtcagtgtttcctgttattcgatgattaggaggcagcttaaactagagggagttgagctgaatcaggatgtttgtcccaggtagctgggaatctgcctagcccagtgcccagtttatttaggtgctctctcagtgttccctgattgttttttcctttgtcatcttatctacaggatgtgactgggaagctctggtttcagtgtcatgtgtctattctttatttccaggcaaaggaaaccaacaataagaagaaagaatttgaggaaactgcgaagaaagtgcgccgtgccatcgagcagctggctgccatggattgaggcctctggccggagctgcctggtcccagagtggctgcaccacttccagggtttattccctggtgccaccagccttcctgtgggccccttagcaatgtcttaggaaaggagatcaacattttcaaattagatgtttcaactgtgctcttgttttgtcttgaaagtggcaccagaggtgcttctgcctgtgcagcgggtgctgctggtaacagtggctgcttctctctctctctctcttttttgggggctcatttttgctgttttgattcccgggcttaccaggtgagaagtgagggaggaagaaggcagtgtcccttttgctagagctgacagctttgttcgcgtgggcagagccttccacagtgaatgtgtctggacctcatgttgttgaggctgtcacagtcctgagtgtggacttggcaggtgcctgttgaatctgagctgcaggttccttatctgtcacacctgtgcctcctcagaggacagtttttttgttgttgtgtttttttgtttttttttttttggtagatgcatgacttgtgtgtgatgagagaatggagacagagtccctggctcctctactgtttaacaacatggctttcttattttgtttgaattgttaattcacagaatagcacaaactacaattaaaactaagcacaaagccattctaagtcattggggaaacggggtgaacttcaggtggatgaggagacagaatagagtgataggaagcgtctggcagatactccttttgccactgctgtgtgattagacaggcccagtgagccgcggggcacatgctggccgctcctccctcagaaaaaggcagtggcctaaatcctttttaaatgacttggctcgatgctgtgggggactggctgggctgctgcaggccgtgtgtctgtcagcccaaccttcacatctgtcacgttctccacacgggggagagacgcagtccgcccaggtccccgctttctttggaggcagcagctcccgcagggctgaagtctggcgtaagatgatggatttgattcgccctcctccctgtcatagagctgcagggtggattgttacagcttcgctggaaacctctggaggtcatctcggctgttcctgagaaataaaaagcctgtcatttcaaacactgctgtggaccctactgggtttttaaaatattgtcagtttttcatcgtcgtccctagcctgccaacagccatctgcccagacagccgcagtgaggatgagcgtcctggcagagacgcagttgtctctgggcgcttgccagagccacgaaccccagacctgtttgtatcatccgggctccttccgggcagaaacaactgaaaatgcacttcagacccacttatttctgccacatctgagtcggcctgagatagacttttccctctaaactgggagaatatcacagtggtttttgttagcagaaaatgcactccagcctctgtactcatctaagctgcttatttttgatatttgtgtcagtctgtaaatggatacttcactttaataactgttgcttagtaattggctttgtagagaagctggaaaaaaatggttttgtcttcaactcctttgcatgccaggcggtgatgtggatctcggcttctgtgagcctgtgctgtgggcagggctgagctggagccgcccctctcagcccgcctgccacggcctttccttaaaggccatccttaaaaccagaccctcatggctaccagcacctgaaagcttcctcgacatctgttaataaagccgtaggcccttgtctaagtgcaaccgcctagactttctttcagatacatgtccacatgtccatttttcaggttctctaagttggagtggagtctgggaagggttgtgaatgaggcttctgggctatgggtgaggttccaatggcaggttagagcccctcgggccaactgccatcctggaaagtagagacagcagtgcccgctgcccagaagagaccagcaagccaaactggagcccccattgcaggctgtcgccatgtggaaagagtaactcacaattgccaataaagtctcatgtggttttatctactttttttttctttttctttttttttgagacaaggccttgccctcccaggctggagtgcagtggaatgaccacagctcaccgcaacctcaaattcttgcgttcaagtgaacctcccactttagcctcccaagtagctgggactacaggcgcacgccatcacacccggctaattgaaaaatttttttttttgtttagatggaatctcactttgttgcccaggctggtctcaaactcctgggctcaagtgatcatcctgcttcagcgtccgacttgttggtattataggcgtgagccactgggcctgacctagctaccattttttaatgcagaaatgaagacttgtagaaatgaaataacttgtccaggatagtcgaataagtaacttttagagctgggatttgaacccaggcaatctggctccagagctgggccctcactgctgaaggacactgtcagcttgggagggtggctatggtcggctgtctgattctagggagtgagggctgtctttaaagcaccccattccattttcagacagctttgtcagaaaggctgtcatatggagctgacacctgcctccccaaggctttcatagatcctctctgtacattgtaaccttttattttgaaatgaaaattcacaggaagttgtaaggctagtacaggggatcccgcataccgttctcctccttttccccgttgtgaggacagtgcactgtattcactttcaacatccaaggtctgtgttgagagggtgagttgtgcggcccagcttgccccaagcccgtcttgccatcacgaaggatttcctgactcagctgaatctagctcaacaaagcaaaggactaactaagctgcagattttctctccgctgggcttagcctacattatttacacctgttttcagctggatgggaccaaactggggccttgacttctggggtttccacgtgatccccaaagaggagacatccattcattcactcaggtatttgcttgtgcacctactgtgcgccaggtgccagatccaggaattgaagcccaggaacaactcttgcagtgagctccccgggtttttgttttctgaacggtgggaagacaggtcagcaaatagccatgcacgtctgcacatgtgtggctggtgtctgcaggagtaccgagaagacggtgagctctgccctggatggcaacaggaaagggcatccctgtgcagctgtttgtcctggcacaggtggcaggctgccagcgggaccaggaagggaaggggaggatgcacaggtcggagggaacggaacgggcactgcaggtgcgctctgcgatgtgaggaaggaagcaaaggctggttccgggatgatgtcggagaagccttgcagcctagggcactgcccattccacgttacccagtgagtcaaagcctcccagaaagacatttagtcactcaaagccagtgcaggtctcagctttgtccggggaggaactttcactctagaaaacacgaactcatttccctttgaggaagttgtttctccaggatatcatttccagccaccatccaggatgctgggcaggtgctgcagtgcccaaggcacggctgccgaagaagcttgtcccttagaaaccccttgtggcctcggaggcgcctgcctgcctccctgagaatggaaccctgttgggccgccaggctcgctgggcaggtgctggggaaggctgggtcaccgtgctgagcccctcacaggcctgggagttgtgcttggggaggagagctcccagctctttggctgcctcccaatcatggccacatctcacaaacaataccactgtccacgaaaaatgaaaaggtgcctggttctaacccatggccccaaccatgaaagagcccttagaatgtgggggtttgactcgaacagtggctttgagtctcccaggggggattagtgtcctaatgccctgagttaatgaattgacttgttggacagggaaactcagtgaggttcattttctgtggggggacgtttgtcaaatgctgtgaaatcagttgtagcatacgcgacgctcagctgctccgacagtgactcagccacggctccagctgcttccccagccctgtagtggaggtggcagatggtgtcatcagcctggcgcagagggctgtgcccactggcatcacaagggccaggcctgctggtcctccagccactggatccaggtagttacatatgggtttaaaagaagagaggcagggccagttgcggtggctcatgcctgtaatcccagcactttgggaagccgaggtgggtgatcatttgaggttaggagttcaagatcagcctgaccaacatggcgaaacccagcctccactaaaaatacaaaaaaattagctgggcatagtgctgggtgcctgtagtcccagctactcaggaggctgaggcaggagaattgcttgaacccggaaggcagaggttgcaatgagtcaggatcatgccactgcactccagcctgggcaacagaacgagactctaaaaaaaaaagatcaataaataaaataaaaataagagaggcagggtgggagtattacttgaggccaggagtttgagaccagcctgggtaacaaagcaagaccctgtctctaccaaaataataatttaaaaaattacccgggaatggtgtgacatgcctgtggtcccagctactctggaggctgaggtgggaggaacactcgcacataggaagttgaggctgcagtgagccgtgatcacaccactgcaccactctagcctgggtgacagagcaagacctcatctctggggaaaaaaaaaaaaagaagaggcttggaagccacattgttttttgtcacttataactagagtttcgtccatcaaaagcccattctgcactgatttcagtgataggggtctgatgctggcttggaagagggcctgacagcttagagacaggcttggagttccaagttgatgaaagaacgatgaataatgaaaaataatgtgttgttctaaagtagtgccttttcatactgagctagggtataatttgggtccatttcaagggaaatatactagcagaattcatcaaagtagcccctcgaagactggtgcctgctgcctacgggacaatttaatcagtggttccagctgcacatctagagttgggaacactgaacccaggctttctcatgcagatggggtgtggattgctaaggtggctgtctcctagcgctgcagcatgagtgaaacacgtgtccattctacagagacgcggctccgtgatgctgaaacctccttctttttttttttttttgagacggagtcttgctctgtcgcccaggctggagtgcagtggcgatatcttggctcactgcaacctccgcctcctgggttcatgcaattctcctccctcagcctcctgagtagctgggactacaggcgcgtgccaccatgcctggctaatttttgtatttttagtagagacagggtttcaccgtgttagccaggatggtctcgatctcctgacctcgtgatctgcctgcctcggcctcccaaagtgccgggattacaggcgtgagccactgcaccccgctgaaacctccttctagataacagcggcgttaagcatttttttttttttttgagatagagtgttgctctgttgcccaggctggagtgcagtgatgcgatctcggctcactgcaacctccacctcccaggttcaagcaattcttctgcctcagcctcccgagtagctgggactacaggcacacgccaccaggcccagctaatttttgtatttttagtagagacggggtttcagtatattggccaggctggtctcgaactcctgacctcatgatccacccgtctcagcctcccaaagtgctgggattacaggcgtgagccactgcacctggccaaaacctcctcctagataacagtggcgttaagcattttttttttttttgagatggagtcttgctctgttgcccaggctggagtgcagtggtgtgatctcagttcactgcaacctctgcctcccgggttcaagtgattcttctgcctcaggctcctgagtagctgggataacaggcatgagccaccactcccagctaatttttgtatttttagtagagacagggttttgccatgttggccaggctggtctggaactcctgacctcaagtgatcctcccacctcggcctcccaaagtgctgagattacaggcgtgagccactgcacctggcctttttttgttttttaagacagggtctcactctgttgatcacagccacagctcactgcagcctcaacctcctgcctgggttcaagcaatcctcccaccttggcctcccaggtagctgagaccacaggcacaagccaccatatctggccctacgtaagctttatgtgggtgcaataacagatctcaaaccagctctcagctcaagagaaggggaagctgggcacagtggctcacgcctataatcccagcactttgggaagccgaggcaggaggatcacttgaacccaggagttcgagaccagcctgggcaacatagggagacccctgccctccctgtctctgaaaaaaaaaaaaaaaaaaaaagaaaggagaggctgggcttggtggctcacacctgtaatcccagcactttgggaagcccaggcaggaggatcacttgaaccctggagtttgagtccagcctgggcaacatagggagaccttgtctctaaaaaaataaatagagtgagagagagaaggggaagtcaccgggaggacacacatggagcacgcagcccaaatggggctcctctgttctccctgcagagtcagttcgtacctttcacatgcacaaaggtgttgatccaaccgaagcaatattgattcttgttatattgctttattgtggggtcagtgtcagagtaccacgagttttcatcacgcaccgttctttccccagctgcagtgtgtttagggggggaacgaggccccaccccctatccctatcgcctctgcctttataacggctgctactctctgagcacctgttgagttctttcaccttccagatctaatgtgctatccccacccctagagaacagggctgctggatgccacatggctcccagagaggggctgtggtcagggaagccccagctccaagggggctggaaaaccccagagctgcccacgtgcggcaacacagtctggtgctgcaggtgtgaggacggctacaaaatacctgagccattctgtcactctgtctgaactctgtttgaaatattgtttcaataactgctaggctggtttttccttcctgactatattcctcaaaccaacaagagcctagcagaggaaagcatggccaaaacgccccaagaagagagccttggcttcacctccaagggccaccatccgggaggatgtcctcagacctctgatcccctctctgcaggctctgcccagccctgtgtggcaacccagaggaagcctccccttcgtttgagatttaaccccagaccttaggcgatggctgcccagcctgtcccttccgcctgtgtggctgcccacgcgggcgttgctcatggggctagtcctgggtggatgggtgggggcctctcgccggctcctctgcctcccacccccactggcaccccacgcctgtcctagaaggttctttctgcctgttttctccgtgagtgactggacaggcagaggccggccttgctggagggggcatttgtaattatgagtgaatccaaaacaaggttttttccttccgcagccccccgcccggctgtggggcccagccactgcacttcaccggatgccgtctggttggtcctcaggactgatacagaccaggaccccagggccagcccgtgccaggctcctatgcttccaggagcacgggtgggtggtcctgctgcctggccggccatcctcctggggtcggtctctggccgatcctccctcctcctctcaagccctgcacagcccggccaggcaggtgcatcttgtttggctgctgaggagccgggggttcagggaaattaaggaacgtgcccagggacccggggccagcccgtggggacgctgggattggagcccaagccccaggttcgccgcgcggctctcgacttcctctcctttcccccaggggcgagctcagcgaccgcagagaggtggggtcgatctccctgcgaccccagggggcccgcgaggccagtgcgcgggcaggagcggggacgtgctcagaagagccgggcgccgccgcgcccgcccgccccccgtcccccggctcccggctccgcgcgccccccgccgcccccggggccctgctacccccgacccgtccccacccgccggccgcccccatggcccggctgggcgcgctgctcctggccgccgccctgggtgcactgctcagcttcgcgctcctggccgccgcggtcgccagcgactactggtacatcctggaggtggcggacgccggcaatggcagcgcctggcccgggcgcgcagagctgctctcctcgcactcggggctctggcgcatctgcgaaggtaaccggccaccgcgccggccctcctccctccgcgacctcgtccctccgacacccccttaaccccgccctgctcgtgttgccccgccagacccccttccaggacccctctcttgcatcccgctctgccccagggtgtctctccgctccctccccatcaccctccgtcttcccccaaaactgacagcccaagggctacaggagggagggagcccagttcggggcccctcacagccggaggagggggctgtggggcgacagtgggggagggaagcctagaggtgtgtagttggggggcctcatccaagtcaccaggggttgtttcttgatcacgctccccggggtttgggcctggcagccccttgtccccgtccctgtcaggcactgtcagagctgttcaccccacacctcctgatgccgcgggggcaggggttccaaatgtgtacagaggcttcagagtccggggagagagaaggggatcccagcaggctggagggtccacagggccccctccgttccccccagctccctcctccggagctggggccagcctggggagcttccccttcacagcgcgagggctggcagggcaggggtgtgtgtgtgagtgagcatgtgtgtgcatctgaatatgtgtgcatgtgctgaacatgaacatgtgtgagcacctggctgtgtatgtaaatatgaatatgtgagtgtgagtgtatgtagttgtgtgtgcatgtgaatatgagtgtgtgagcatgtcagtgtgcatgtgtgtgcatgtgagagtgtgtgggcatgtatatgagtgagtgcatgtgtgggtggtgcacatgtgctggtggcttcctcagtgcaactggggaggagttaggagccttgtgttcatccaacagactgcctaactgtgctccaaagacctcctgacatgcacctgtgtgcacgtgtgcacacgcctgtgcctatgcaggtggctctgcacgcgtgtgagaaccagagagtatgtatgcccacatgacacgagtcaggaagattccagagcgaggcttcccaggagcccgttttgtacaccctttttcctttcaggcaaagcctgagttccacacacaaacgcattacaaggacccctgcctgagggactctgagggggcctccatggagcgtttgaaagtttaaacatgcacctgtgcaggcataacttgcacgtgaaaataaacaaggtgaaggctgggcccggtggcccacgcctgtaatcccagcactttgggaggccgaggcgggtggatcacgaggtcaggagatcgagaccacagtgaaaccccgtctctactaaaaatacaaaaaattagccgggcacggtggcgggtgcctgtagtcccagctacttgggaggctgaggcaggagaatggcgcgaaaccgggaggcggagcttgcagtgaaccgagatcgcgccactgcactccagcctggggtgacagagcgagactccatctcaaaaaaaaaaaaaagaaaaagaaaataaacaaggctaaaggtcttgggccttttcatcccacttggagtcccagccctgagtttcagcagaagagaagctggcagggccctgtggtgccagggggtcccctgggctcgggtaggctgctgggtgcaccacagcgtccaggccccaggcttcgaggcctatgtttcccagggcagaacggctgcatcccgctggtcgacccttttgccagtgagagcctggacgtctccacctcggtgcagcacctcatctgtgagtcctgggtggggccacctccccatcctttccaaatattcaggcaaggcagatcccagccatccccatccccatcccgcagcactgcttccactgcccctgcgtttccaagaggacgtttccacgcagacctgtcccagtgctgtgctgctgtccctaaccacaggtgcccagctcccagcctatcctgttttcccctgtctcagtttccctctcagtggtgatggctcatccctttgttattggggaagccaggcagctcccagcttggctggatcctgcgggccttgcagactcctggctccccatttaggactcgattcttccagatggcctgctgtctacctggctggcaccttccacctggcgggttgggggacatgtgaggcctggggatgggggctgggagtgttctggggacgcctcccctcctggccttaggaagcccctgccagagtcagagggggccactgggagggtccagtggtgtccacagagatgggcgtcagccgcttttcctgagaagacgaagcaccacgtcactgtcctccggcagacaagtgctgaagggcccacctggaccagaattctcacctgagccccctttcctgcagtgctgcaccgtgcagtcattgtggtcctgcccctgagcctggtccttctcgtgtgtggctggatctgcggcctgctcagctccctggcccagagcgtgtctctgctgcttttcaccggctgctacttcctgctggggagtgagtctggggccctgggggaatggctccaaagatgggagctgggccacaggtcccgggagtggggtgctgcctctcctgttgccctcgtcccctgctcccttctgggcgggtgctgagtctggcgatggagccgtggcaggcagctccctgtggttccagaaggtacccatgtatatttgttctcacgttgctataaagaaatgcctgagactgcgtaatttataaagaaaagaggtttaggccgggagcagtggctcatgcctgtgatcccagcactttgggaggctgaggtgggtggatcatctgaggtcaggagttcaagaccagcctgaccaacatggtaaaaccccatctttactaaaaacacaaaaattagctgggcttataaagaaaagaggtttaattggctcatggttctgcatgctgtagaggaagcatgatgcttggcttctggggaggcctcaggaaaatgacaatcacaggcggaaggccaaggcagggagccagcatttcacatggctgggacaggaggaagagagtagggaggtgttacacacttttttttttttttgagatggagtttcgctcttgttgcccaggctggagtgcaatcgcatgatctcgactcactgcaacctccgcatcctgggttcgagcaattctcctgcctcagcctcctgagtagctgggattacaggcatgcgccaccacacccagctaattttgtatttttggtagagacggggtctctccatgctggtgaggctggtcttgaactcctgacctcaggtaatccacctgcctcagcctccctaagtgctgggattataggtgtgaggcaccgttcccagctgggtgctacatagtttttttttttttttttttgagacggagtctcgctct

SEQ ID NO: 96 - DNA, 67111 bp, Homo sapiens
  misc_feature (1)...(67111): n = A,T,C or G
aaatgggacttagagcctccagactgctaaccccatgcaaagctacagctttaataggcttgcccagcatccatttgctgttctgcaggggaagcaaccttcaccaggatcctctagcatttccatgcaacctaacatcaaagtgccaaaccctggaattagcagaaaacactgagtggctgccgtactgagctaaggcagctatgacttcttcaaagctgccttttttatggaaacaaaaggcgccagggcccttggtcattcatggctgtggttcctccatgtcctgtttccttaggaccccgtaagatcaccctcctgatccatcactagttgccattctaatgatctatcaggaaaagatacctgccattgattcggtttccctggggtggactcacagtaatttatgaaccagccagagtgtcctctccttgcggacttaatacgcttaacagctaattacatctgtgtagggattacactttacattgtccagctttatgaaaacaaaccctgggcttcctcagattccgttaaatagctccttatctctaaggctgtgatccttatcagtgccatatgtttgagcacccgtgcagtttccaaatgactccacgaacgtcttctagggtctaattagtctacaggctgaaggacaggcctgaacagggtctcatcctgaactagaaaccagcaggccaaagccaagggggaagattcctccctgccttctatcctccataaaccagtcaaaggtcaagggtccagacccggatgaccacatgtcaattctactcacaaggtgaccagcatgtccgatgtcaaccttcatacaatgtggagcttgggtgctcaagtcccagaggatcatgggatatctttagccaaagtcaaagtgaagtctttgtccttcccaaggatgctgtgggaggactattataatagtaacacttgtgtttaaaggataaacgtctttggctttttaacacaagctagctaaacccttccaacccccaaggaaacaagtcaatgctgctggcttccttttgccaccatggcaagggaggtctccgcagggaagccaatttgcctcacatactattttctcaaggcttgggagattcccaggcttggcagacactaaaaacactccttcccttggcttataacaattcagctaaagaccttgtcttaagaaactcatgcaaggaggtgatgcagagtgcaaagatcaggaaatgtctccctgtgtgaagagcccgtagcagaggggcaggctgtagctttccagcctgtgactcacagagtcacttccctgcttcccccatcctggactcagctccttggccactgtgtctcagctcctcttcctgtctccattccgcccagacccctgaacaaagcagaagtctggagtccacggcaaagactgaagtgttgtgtatatatttgggcgtcatctgtggaagcagctattttgaaaacaaaaaataactttcctgccctcagaagaacttggtgggctcttagaagtgtctcatttaactgtttgagacagaaaacttggttatcactcattggaaaaagagaggcagacagagtgcattcattttcattgatctgtaataataggtaaggtggccccttgagttggcctggtggataattgctctgctctagagccaaatggccctgggtttgattccccacttgtgtgccctagtcttctcatcagcgaagtggagaaaacacattttcctcatagaattatagcagaattgacatcttcaccacagtgattttgcctgggcactgtggctcacgcctataatcccagcactttgagaggccaaggaggatcacttgaggcctgggcaacatagcaagatcccatctctacaaaaaaaaaaaaaaagtaaggcatttattgcttattatgtgccaggcactgtcctaagtgctttacatacagtattttattgaatcctcacaacaaccttgtaaggtgtgttctattattatctccactttattaatgaggaaactgaggctctgagaggttgagtaagttgcacatgatcacacagccactaaatggtggattcaaacacaggtctgtctcacttgagagcccagctgcttggtgtccaatatgctgatgtaaaagggaacttgaacttggaggtcccctggtccaaatgcctccctgagtccttaactcctggcaacttcttgactccttcccaacagccttacagagcaacatcctcttactccagaatgggaagaacctgaaagacataaaggaaagggcatgtgattgggaatcagatgacccagggtctactattctcatggtttctatccgttgtctaactttgccctttgggaagacaaaaaaacccagaatgctttcctcgaaaacctcttcatatattgaaagagagcccttgccctcaaatcttcccctgtctacttccagcttcccaaccattctttctgtaagaccaccccgatcagcctctaccaggtatgctgcagcttgtcaagttaacccttaaatgtgagcacgagcattgagggtcagaatccaagggggtctgaccagtttgtagacaacaggataactcactttcttgtctctacttgtttatctagttatacagttgaaaatttcctttgcttctttggaaacccaatcatattctgaaaacacattcaacaaaagtccctaagtacttttgttcttgctggtgtcaaggagggcagcttaaaggcactaaaaatcaatttgctgagagtcaactagctaaaattctattcaccaaatggccaattttatcattgcattccacagctatttatttagggcctactattgtcaggcactgttctaggtgctgggcataaagcagtcaacacaatagacaaaaactttctagaatttctctggccacttttgagtttttctgattcctttggaatatcattttaaattttttcaatatttggacatttttaccattctttaccattcattttcaagtcattgaaaatgataaaatatatttatgaaaggtttaagcctgcattcctcaacttttggaaaattgaaacttccatagatcctgctatgaaggcagagtgaaaatcaatccataaaaacttcatagaaaccctcaagttgctataaactttataaataatactgaagaatgttggtttattgatcaatttaatttgatgagttagtcagtaggcaaattgttcatttgacaacctgacctttagtaaattgatcactggctaattgatttttggcaaactgacataactaattagcaaactaaccaacttaaacctgttgctaagcctggtgtcccactccaaaattggtgcagaaatatcaaataaatttatttgatgcagcctttgaatcctgaccagtgagctctttctgagtcttgactgttatacttcagcctccccaggcacctgtcacccagcaatttattcttcatgatatgaaagtctttgtgcagatctttaaaccaaaggaaccaagaagagcagtacatttctttgaaggcctccatgcagtttgttgagggcaggttaactgacaatctttgagaactgtctttcaacaaggtatgtctaccacactacgctaccgctagcatcatcacatgaatataaaaatagctaagctttcttgaatgcttgccacatttgaagtagtgtgctacctgctttacacacatctcatttaatcttcatccagatgaggaacataagacacagataggttaagtaacttgctcaagaccacatagctagtgagtaacacactctttcctctggaagttagatgtttattacaacgctgagcttttgtgtttagtcattgcttagtggaattatcccataggtaaagctaccttaaagaagggaatgttgaagccaagacatactgactaagacacttaaaggtccaggtcaccttaatatgtacctgtcatttggctgattgatttattataggatgagtcagctcactgcctgccatcaagagagatctcatcctggcttttatctcaagtaagaacatgtcccccatgtcttcagtagactggattcaatgctggtatatgtgacctttcatactgaggcttcaagccttaactgcccatcttcacttgtaacatggtgataacagcacctaatgcaagggcctttgcaaggatttaatgagataatatatgaggctcgatgcctggcatgtggcagatgatcaatagcagttctccacccttctagctgctcatgtctgagtgactgcagagctacttagatgcctatcaccatgaaatagagagaaataatgcaaattaagtacattatatatatttatttttaaattctattatgctgtgattaaacttgctccagcatatctgttgtccaaaattaatgctcactggtatttttttaagtgagcattattaactaattttgtaagagccaacttacgaatggattctggcataacattttgctcctttgtcaaagaagcaataagccttcctccagtacaaagggtcacaggaaaaaaagctggaccaaactctgaaattcactgatgaataagaagataagagaagaatgaggatgcttttttctctcttcatgacagatcttcaaggtaatttgccaaccatattagacagaggagcaggggaacagcacagcaatacatcatgatctatccacaatgattgaattgagggaaaattcatttctgttgactcaagtacaggctgctgaaaagattctcaaggtgatttatacagaagtaccctttgcttggtgaaacaggtgtatttgtgaagtgttgtgtgtgttgcttgataatgtttttgaaatccccaagaaaaaaatcattatatgaaacaatccttactgaataattcctagtaaaactaatgagatgatagaacgtattctttctgtactctgtatgttcatccattagaaaagtaaaaggcagcatgggcactgtggctcaagcctgtaatcccagcactttgggagggcgaggcggatggatcactagaggtcaggagttcaagaccagcctggccaaattggtgaaaccctgttctactaaaaatacaaaaattagctgggtatagtggcacacacctataatcccagctactcaggaggctgaggcaggagaattgcttgaacctggggggacggaggttgcagtgagctgagatcacactgctgtactccagcccaggtgacagagtgagaccctgtctcaaaaaaaaaaaaaaaaaaagagtaaagtaaaatacagaacagtagtaaaaaggacaatatagcattgcttaacgattacaccaaagattccttccatgttgccattcagtccctgctaacacggagttcttccagagcaccaacacaatctcatcttgctttacaagtgaaatgcaaattttgcaacatgaggtgaaccagactaaataagcctaatttcctcagccttctgtaacagggttcttacctgggtttttcccatgagctccctgactctaaagtcagcttaggtgcctccatggtaaatctatgcattacgatacttaaagaggttcctgaactcagctctttacataagaatgactgaataaagaataactgagccaatagtgagaactatgctcaattcatcaaggtaagaccataaagatatgtagactgttctggaataagagtggccttcctcctctctgtggttctgctgataacccttaacccatgaacctaaggaaataattttgaccactgcctaataggttgtctggcacatagtaaatccttaacaaacacttgtggaaatcattaatgacactctttttgtgcatcctactctggcctacccacgtggtctacactgtgatacctacatcttgcttagggtcccaattacttaaatgagttcatattaaccaactctgtaaaataatgtctggcgcatttaagcacgttatagatgcaattaaatatgatcaaataaatatatataaattaaatattactcacttaatgtttagtattaagggctgaatctgaacgtgacacttggtttctacggaaggccttgcttttccccactatgtgttttgggatgtctgccagttttcttgttaacctggggagtgactatgagatattgatgttcactttctgtctagcttgagttctctgcctcgtatctgggttttcattccagttatgttctctctgtggcaatgaatggaatgttttcaatcccctttgtcaggataagttatttcagcttaaagagatctcccgtgcaaagcaccagaatctcgttaaacctctcctggtaaggtttgttcggagggctcctggtgagtcattccatgtctggatcctgtgagctgcgcatagacccagagtcagacattgtgagagtacctttaactggaagaactcaacccacaaaaggacctttctacaaatacatgtgttttctaactaaaatctgaaatcatgannnnnnnnnnnnnnnnnnnnnnnnnnnnnnnnnnnnnnnnnnnnnnnnnnnnnnnnntccctgcccatttattttctttagagataatcaaagctcttgtatacgtttgcaccaaacagtaaatatgtaatgaaaatttttttgaatcggtgtctttcctgaatttattcccccaaaatattatttcctgaagaaaggaaaagataaacagagcaaaaaatgaaataaagttagagtaaaaaccattttcttattctgtttttctattgcaatatctaaaagttgagagcttcaaacaattaagggatgagggtccactgtcaccagcttttggtaagtacgctgattctatgttctaaaatgcttggcataaacaacaggtgagtataaaataaaaaattaaaccacatattttcttttctttttttatttttaaacaaaaaaattcacaaaagtgctgaatttaacatctaggaggcattaagtaattacaggaaagtcatatgttgcgttataaagcaaataaaatctatggtgcaatttgatgtcttctcaataacattcacttgatatcaaccacagtttactgtaaaccttgtcttatcagtagtcttcattagaatactttttcctaactcagataactccccccttatctctgagttagacctctcctggggccagtatgttctactaccagaacttcaggtcaacttggctgttaatttctctccgggttgctcctcccagattctgccacttttctccatttcaatcaaaaacagggtaaaccgtattttaccattttaattttttagcacctaagagcagtctgtaacttttccaaaagttaaacttaaatttgctttcacaaaaacgctacagatttttaattatgcctaaatccttaaatggaagagattcatttaggaaacgcaatcttataaaaatgtgttagaaccccctttgagctgtgctcactgcatacccaagaatacatggacttgcccagtgcccctaagggaaaggcccatgcaaatgaggaaagatgtgtaagaacagctatttttttccaaagactttagctttctgggtttgcctgcattttatcatctgctgataaatatctgagtcaaaggtagaaagaaagacatgctgggggtacaggaaaattgggttaagtcagcaactagaaagctgtgggttgtggttttttgcttttcgtccttttgttgaagaggacaaaggaatgtgcattgataggaaaacctaatccggggtagtgaactgaaacccccccctccccacagctctcacctctcctgctggggtcgggggtgcagagaagaaggtgagtggagagagaaatggaagatgaggagacgagggtttaaagggagggagaaggacagaagtggatcaagggagagaaggagggagggcagaagccagagggagaaacagtagccccacctaaaacacaccaaaagcctccaaggaaagctttgaaaataagaccctgcaggaagcacttttagaaaccacagacttttcttcaatacaggggcaaatgaggagaaaaaaaaatgctaagaacaagaggcatggaagacagaaaagagaggaagaaggccaaacctcacctcctaatcattctgcctgaggtgctgaaagcatttcttaataaagtgtgaagtttcagctgaatccaaatttctggcattggaagcaatgccagagccacttatgaaaaagaaaatcttctctttttcttaaagtgaagaaaatcctgtgttttcctacaaggtcttctccatcccaaataacctagactcttccattcatttactgaaagagactgtaacaacaggaacagatgaggaactctctacaaggccagcctgacccacagtttaccagtgtctttcaggagaccctaatgttctcatccccaatctggaagtgccatccccaagaacacacaacagcaacagccccacccttcatcacaaagctgtgcagaacgtctcagtgacgtgctagttttgaacaatgatacaatagggttgttgccaaccacagggaaaacagggatatttaataaacagtgctgccatgattgataatctgcttgaaaaaaagaataaagttagactcctatttcactttgctccatatatgcaaataatcccaaatggatttaaatgcaataaaagaagaaaatttagaattgggggtttagaattggaaagaccttctctaataaaattttttaaaacctaggagccattttttaaaaatagggagaggcatatttgactagataaacatttcaaaatcttgtattaaaaaatcacaaaaaataaggtcacttatttgggccaataatttattaaataactccacctactgaatttgggtgatggtaatcattcaaaatggcaataatggatcttatgttctgactctgtaagtatagagtagaatattattagagactgtaaatctggtccatgcctccctgcactgccatgggtctgatcacttgtctcagggtctttcaccccctgagtttcatgattggctattctaacagatatggagttcactggagggccaaggaatcacatatactctgttttaacaatactactaaagtgcttagaatataatatgaaaaagtgttggggggtgtgtgggagggatgnnnnnnnnnnnnnnnnnnnnnnnnnnnnnnnnnnnnnnnnnnnnnnnnnnnnnnnnnnnnnnnnnnnnnnnnnnnnnnnnnnnnnnnnnnnnnnnnnnnnnnnnnnnnnnnnnnnnnnnnnnnnnnnnnnnnnnnnnnnnnnnnnnnnnnnnnnnnnnnnnnnnnnnnnnnnnnnnnnnnnnnnnnnnnnnnnnnnnnnnnnnnnnnnnnnnnnnnnnnnnnnnnnnnnnnnnnnnnnnnnnnnnnnnnnnnnnnnnnnnnnnnnnnnnnnnnnnnnnnnnnnnnnnnnnnnnnnnnnnnnnnnnnnnnnnnnncatacttatcctcaaaatagttgtggtgatattataccctcatactttgtactacaaatacatttattggtttgtaaaatatataatcagtttatgaaaatatcccttataagaagagtaagaaaaccagtaaaaatgtaaaacaaccacatggaaattatgtctgattccttcttctccattttattttatttttaccttttttctttgagatggaatctgaccatgttggccagactggtcttgaactcctgggctcaagcgatcctcccaccttggccccccaaagtgctgggtttttaggtgtcggccactgtgcccagccaccccctcttccattttagaaatgatgggtacagtaatgcaaccttgcaaagggattccttcaagtttttcaatgttctttaataaaatgacatcaattgctgaaagcattatgacctttgttatgctacataatactgatacaaaatgtgaatagtacaaagttcattatatataaggctttaatatattacatttgtttctacataaacagactataaatatatgtgccatagcatgtcttatagtcattgttcccagcatttcacactatggtaccaaacaaaaaacacattttcttttttgaaaaaaaggacagaacaagggcaaaaatcagtagaaatagctctatatgttaaaagtctaaataatacaatagatgttataatttgggctataaaataattttgaagtctggctaataatcattcagagagtgaacaaacccaatcaggtttactggagtagaggccaaataactaaaatactgatgggttgcggggtgagagtgggttggggacagggggaagaacaaaagggtaaaatccttcctgaaactttgacaccacacacagcttcacattgaacctcccgcattcagtctcagacatatcacatcaggacagatatgagggtattcattccagaagaaaccagaagctggtttgtgcagtcagaactcttcaacacggcagggagccttgagctgaatgtcctttctttgtggtattctgaataaaggatcagcctgggagacaaggagccagagctgcatcatttccttcctggggcttggccaggagacacgtaacggtctggaaggaactctcattaggagtcagaaacagcacaacgaactctactttagcccaactcgaagaacacgcaaccttctaaaaccagaaaccccgtctgaaccctttacatttcagaacagaccccatgcccacctccaccagagcaaacacaatgcatttgcaggctccagtactctccaaagcaaggtaacgttagtcttcctttctatcaatccgaattccacacttaaggcttggcttgggacccacgtcctaaacaaagcctcttggatagactcagccctgcaaatccttcccatcttcaacacctcgaacacttacattgcctggtttatcttctagttttacagaagtgtcagctccccaggtactgctacttctttgaggatggggccatttcttgaacgtctttgttctaaacccatggtgagacccgcagcagggggcatgataaatgctttttaaatgaatgaaaaagaggatcaggtcaacactgggagaagacacagacacattcttgggtcacaagcctcttccaggatatgcctagaagactggctccctgcagtccgaggtcctttttctgttgtcgaaatgaaaatcaaatgcggctacttcctgctggtggaaagaacaacacttgaaaatctgagcagcacctctcatgtgatgtccgggagttgggggtgtggatgcttccttttaaacaggaggagagctcagtgtggtccccgagtcaggctggagaatctgggctgtgctaccggtttgcactccaatctctatcagctttaaaagttctgcttcctcactggagtacacggtggtgtctgtgtcatcggagtgatatccggactggtagccgcttgtctggtttgagccttcagatgccacagactccctgcttttgctgggcaccattccactgcagaagaaatggcaaacaaaggagttggcagagagaagacaattcttttgctttttaccctcaccccattcccaactccatatggctgccatctccctggagaccgcagccccgtatctctcccagttgttaatcagcatagcaggtttacagggacaaggtctattttcaggtactcgcatgaattagtagttgcagataagtcctcttactcaggtccaagtctttcaagcctcaaatgagatgaaaggcagttctctcgagttatgcaaaggccccaactgatggaacatgtttatggcctcgcagattgacaaatttgtatacagtgacaggcgccaaagggccacttgcatgatattcaaggaaattgggatgttcttaaatttcacttgtgcttttcctattgtggcaatttgggaattacggggcatgtgtatggttgtaataaagctcttgagcaactttaaactttaataacttgaagcatgtgtgcagtcaagccagacatatcaaacgctgctttttactcatcaaaaccacattccttggaaggactgagaacccctgtcactcagcagcaactagaaaatgttttcaatggcatggaatcctgacagacggtaatcatgtcaaagcctagaaatgcaggctgtgttgatctaaaacttcaggatttacactttcacaagccattctaaggtgttttttcccggtaataggtgttttccccaacttcttcatgttaaaactgcaaaagggaattttagtaactcgtgtttatacatagtttaaaagttacttcaaataatgagaaatacaattttttctttcaattcaaccccaacaaaactaatgtaggtgtctcaagcaatggcatggtgctctgcacatgatacttgccgaataaacattttttgaatcaatgaatgaaacatatcattgactttcacaatttcttaccttgggccttaaagaaaacaataaaatagcacaatggcaccttttaatatgttggggttttttttgtttgttttctttttggtatgagcattattcaaaaacccatgagtattcccattttatataaaagattataagcagatcaaaacctcctctattcttacctttaggtaagaatactctagcaaataaactccagcaaatacataactacacttattctattattcttataaatatagattttcattgatttgttatgttaagagaacgtacacgtattcaagacacctacaaattcctactgagccatagaagggagattatatttaaaactaattttaatacttttctcacaatgaaatacttcgaattcagacaataatatttaaatgtctcaaacaaatagatattggcttatttatatatcatacttcttaagcacagatgcacccatttgtatacagacttaaaaattcttcagagtccacaaagattgtaatcatattgacagctttacggatcacatccaatcacctttttcatttagccattactgaccacagtaaatatacacagaaattccctagtattcatgaattctcataaaaattgaccaaattctctaatttatttcagattatttttagatttatcacttaattttattgtgtggttagtttccattctttatttgttaaattgatgctaatttctccaaccaacaaagaccccatagggaaaattctgcacttacactgaaagtcctaagttccttccaaaaattcctattgaaatttgtctttttaatgtggctgagtcttacccaaaagatggagataatttggttctgtcttccaaagttttcagctcttctgaggcaagaaccataccactgtccgtctggttgtcctttttaagagacaatgagatggcacagttaattgagcatataaaatgaccaactatttaattaagctgatttctcaacccatctatcatgtctatcaaataaggtcctgtggaagaacataaaggtatcatagccacaaattgtccaagctacaaaaggaagcaactgcttcctatgagtagacacaggccagggagaagagaaaatttacaaatcagcagctgagaatgcctgttaccatcgctgtcttcactatgacactacttgcactttagtgaaattggtcagaaagctacactgtcttgaaccttggaccaagggctttacttatgaaaaaaacaaagttccatctccataatgaccccatgatacacacactcgagggcagccttctaatgaggctccaaaactttaatgcttaggctaatatttatctagctagtgtttcatcctttgtattatttctaagactatttttaaaagacgtacttacatctgggattacttttacttctggttcttctaacgggatatcttcaaatgtttttacactcacaggccggctctttcgcttactgttctgcagatactgactgcaaaagaacaaatatttatattttagtggtggtatatttgactgcagatcggctacctaagttcattatctttcaaccacaaacttaatagcaaccttcaaaacatcctttagaaaaacaaaacaaaataaaaatctttctctgctagcacacatggaaggcttaatttcctgagaaagtacatttaaaagtataatataactgaggagtctcgatgagcctgttcttttgaatcctacttctgaggtccagttctggactaaagacaacaacagcagatggagtgatcaactgccttctacttggcttcctgattgcatgggattcctccatcgagctctggatatattactgagtgtttcacatctgtctggccatctcctgggaaagtttttctggataatgctcacagagcaaccattcaatgaaagataggcagaggaaacatctgaaggtctccttaaaggatactgaacccagcagtgatttgaagacaacctcttcctcctccatgtaacagaggcttggtgtgcaaagagaaggtgggctgagtctcactgtcccctcgttttcgcccccagagttgctgtctcaggaaagagcagtggtttgagaataacaagatattttgcctatttcagagtctaccactgactgcagaaacttgagaaagtcatgaatatttctgtgaccctcttgtcccatctataagatgtgttggcagtagcactccctccccagctcacagggatgttgggaagatgaatgacatagagaatgttgggcttattgctcttaggaagaataatgccctcttcaaacaaagctcatttttctcctttgacttccaaagcttccttcaggagtccaaagaataagacttgttgaacaacagatcctctccttcttgagaatgctccttcccggccgtgtggctttgggtgagtctagttgatgctatcaaaatcacttacagcccaagtggagggaagggaagtcctattcactggaagggcccaccgagacagaaaatacattcttcattcctataccagcctacttcccactacaagcagacttctggaacatgctgcatagaccttgggccaaaggagaagaatggaaattaattctctctcccctaccccaagaggctggttcctccctatagagagaggagagaatgagattttccggtgacatcctcactcaggaaactccacaagttaagaggatatgatacacagggtgcaagcaaagcctactttctaagtccaacccctaaaagtaacagttgtcaaacactactggtaccgtagtcaatcattcctgcattcacttgttcaggaagccctcactgataatctgccgcaagcctgacactgtgccagaagctgtctaagcagcatctcatgatgtgttcaccacggtacctctctaggggtgagtattactatcccaactcttcagatgaggaaaccaaggcatagaaaatttgaggaacttatccaaaatcacataactggaatgtttggattattattttgagggcaatgaagagccactgaaggattttaggcatgggattgacaagatcagatatgccctttagagaattgactctggattgaaaagaataagactagaggcataagacccaagagacaaatactgcacttcttcaggagaaagaaaggcagcttggctagaaaaagggaatgcccatgaggtttggagacatgggctcattctagagatatctaggggatagaatcaactagggttggcgagtttggacaataattcagctgccttagaaaggacagctccttaaattcttaatccagtaattttttaaatggcatgatcctctcatgattgacaaagcattttcacagacaatggtgcatctgtttctcctaagacggagaaacaggtcttttaactatttcccctttggagatgagggagtcaaggattagggagaaaatggctaataaaaggtagaactgggactcaaacttaggccttcagacactaaagcccatgtgaagtttttgttttgttttactctactccatacagactcccttggaagagtatcaggagggaaaagaaagaagaaaacagcagacacaattgttcaagccattattaagcacccagtatgtgcacagcactgttctcttgtcatgcatgcactgatcatgcagtagcagggtcaggggtgtaagtacggggtatgaaacagacaaaaagtgcagaaaggacagtcccactgcaaacagtctaatggtagagccaaactcaggaatacctagctagcaggctgccccaagcatcaatctacaagggccatttaatcatccctaacaattacaaaatgaagaaaatggtatgtaccaaaacctttctctaagagagaactgcaaagaaatttttgataagctgcttgatgtgtgaggtgaaactcccagggaaaatgacagagcaattgccgatggtccccaaactgccctcaaagaaagatgagcccagcaagtatgtgttttcttgcaggaagcatgcaaacttgaggccagagctggtccacaggggaaattagaggcaaagctaagtctagacatgagtggtccctcccccacacacttctcagccttttctctaaataaatgctaagtaaatatttttcaaatggtttaaaggggcaacaaatcatgaagctagctcccacagtgatatctctgtccaactctatttataatgcaatagaattgaaaattagaaggagaaagactgctcagcttttgtacttggccagaaatgcgtaagaggatagaacaagctccctgagaagtaccccagcctcaactcattctccccagagaaacagaaccccaggagagcaacagaatgaagcatgccgtgtgcaaatgcctctatctgcttttcttcaaaaccagatgattaaaatgtgaccgtgagttttattttatagaaaggaaaaaaggtggaggaggtggagaggagatgcagacaaaagattccaatttccattttatttttcaaattatggctggataaaagagaaactgggctggaaaaaccaattcaaaaatcacagacagaaaataggagccaggcctgtgctgggagtgtggtgtcacatttgtccacgcttctggggataaacgttagcagcccttctatatatccaacatcgtatttggtgcttccattacacaaacatgatttcttctcctgctcagcaccatatgcaaagcacccggtgagccaggaggctgccgactcggatcatcactctacttggtcacagaaaacacatggaatgtagttcatgatcaaatggctttctgataaagggggaggcaataatggtgtgtgggaacaactgtcacactaaaaggccagctcaacttgaactggaaatgtgtaaacacaggagtggaattgtagtctcatctcattactgtttctctctgagggccctccttggcatgggaggaaacaacatggacttaggggtcagaggaactggattcatctcaaggatgtgattttaagcagctcacttaataggtatcttttactgagtgctttcaagggccaggtgcttagaaatagattatatcttataactctcaaaacagccattttcaaacagcaccactgaccttgtctcatttcacagataaagaaactgaggcagagggtagatgatttgccccaagttgcacagctgctacaagacagacttgggggtcctactcatttctatctgactctaatacctgatctttaactacaagtttgtactgccctcaggtaatagaactgagcctcatgttcaataatacatcaaaaaaaaagatcattgtttctaccttgcctgactctgagtgtcatgatgtgggcaacatctgataatatacggcaaagttctttaaaaacatgcctaatgcttttgacttcaatggaacggtcagctgtcttgctggcttctaagctttcttccttcccatcagtgtttctgctgccccacacgactctagagggcaaactgtccacgagtttctccttagcatcccctgccatgtggcaacctggccaagttctggacatgagagagctccctgcccctccctgcagcccaggcacactcgggctggcaggctggacccatgctgtcaggggttccattaaagcaggaaaacacccaaacgggttaggaaagaaacaaagcaaaatgaagtagtcccagccttagtaaagggcaattttaatatcatattgtagaaaaccacaccaactctttccttatgcacaggtgctgggagagagaaaaaagaaagctgcctttagaacccctctgcaaatcaggaaaggactgcagtgcatgtgttttaaataagcccagacatcccattatgcaaataaaatgctgaaaatcagacgtgggaggggcttctgagatgcagtgtccagtctaattccggacacagacccatggctttctgtatccttgccagagagccataagcatgttctcatgcaagcacagaactcttcctttctgaatctctcctaagccatttaattcacattaataaaagcatacacggggataatttaaatgcagatgtctttgtaaaactcgtctctttattctggaaattagcaaactgtggcattccagctattgcagctgcagggcttggaattcttaaaggcaatgctgtggcagcagcgtgggctacagatgggaggaagcacacctacccaggccctcttccaggagcattccccattatgttaacctcagggctaaggttatgtggaagtgggatgcaacagccttagacaaggtcttccttccacttccaatccccctcccgagatggccttgaagtcaccctcccccgggggatgttaggccatatacagtacctgattcctgctgtgttgtcataatggaatttggggtcacatacttcctcctcctccatacaggaaacaggtgaggtaggcagagagagtccagaatcctcttccatgctcaaagtctctgatatcggaagaacaatgtagtctttgccatcctgaaacaataaacacagaagactgttgttatggcttcagttcttcaagtgccttttcattaaaaacaaagggcacagggacttcttggctacatagggtgtgtggctttcatatctgaacatagaactttaagacaacaatacaaatcatgtgtcagaaacaaaaagctgttgaaatggaaggtatattaaaggagagaactaaaaacaagatgggtaagcagcccacagggaagtgcagttacaatgaagagaaagcaggctgtggtcagagaggtaacaacagaacacaaggagctacatagaacaaaaaatcactcattcacaaagccctaaccacacgagccaagcccttcaaagggcatggcatccagttttagccaccacatttcaaggcaatggaaaaactgatgacagtctaaagaaaagcaacaaatgggtaggaaaatgggtcttttgagaaaaggttgcacaacttaatattattgcatcaagaaaaagaaataaagggctatttgatatctgtaaatgtttggaaggtttattgataaaaatagagctgacctatcgtcccccagctgttcaaaagaaaagaaagaggaaattcacttccattgtagtaagaggcattgactagagattaaataacattctaatagtaaacactacaactctaaaatcttccagtggaagttataagaacctgggatgataccaagacagaaaccatctcttttgcatagcttagatgtatttttgcctgcagaatttattaaaaatttcttgaaatttcttccattgttgatcttctgtggatcaaccagattttttctttgttttaactttagaagaggatttgaaaatataacaaaaagataagtaggtagaaatcagagtggtctgctcccgggttataaattagaatcctatctgtctaaaagggtaattacagcttttagaaaagcattattactcagatgtagaagaatacagtagattattcaatggctgagaggatggcatggtagccatgagacagttcaggcagtaggaaagtccttgacatctaagtactctttgtaggtgcttcttggatggaggtgacaaacctgctgagcattagcttgcaagagatttcccaaatgttccaccaactctgaaaacgtgggtctctgactgggctccccgtgccagcagtccagcatggtctggtacctagagaagcaaaacactgatttcattaaatgcctctttcttcctgaatgctgaaaataagcacttaaatgagtacacatttgtaaagagccgacgaggtgagatgctaaataaggatacaaaactgtgtaagacacagagtcccatactccagaggctcaatgtgtatagaaaacatttaaagcaacatctaataaaaactaactggttgctttgaataataaagtactatcttttcaagaagtgatgactccatgcttgaaattatcaagaaaggccccaaagtaaaagcaggacactaactgggcaatgaagaaggtctatataatggaaagtcttccaggcaaggagaatttgcgagcaaagaaagagaacacaggaatacttcttaaagtcttacatttctggtgtagtataatcaggggccctcattctagttccttctttcaatcgcctacaaaattcttcatcaatctttaccccaggatatggagaagcacctagaataaaacagggaggagacattctttgatttgattttctcttatagaaaaccctgagcctgaatcttgcacatcctcatcacctatgtatctattttttttttcaaagcttccgagaagttttgcctgatagacatgaagtacaggagaggaaaagacaacttttgtcttcctctttggagtctggatggaaggacaaaaagaaatgacttacctaaggaaaatatttcccacagcaaaacaccaaaagaccagacgtcactctggattgtgtacactctgtcaaaaattgtttctggggccatccatttcaaagggaggcgagcctacaggggtagaagacaaggattcagaacccaaattagcaaatatctgaagaaaaaaacttcctctgttcctgaacacaggtcctgaagctctctacgaggagttttaattctgttacttaaccaagcactgggttcatatttgaaacttacatctccttttctgacataatctggatctttataaatatcccgggccaagccaaagtcacagattttaaccacgttcttctccgataagaggatatttcgtgccgccaggtccctgtggatacactgcaaagagaatcatgtgtgcattaggtctcggcacagctgatctctttcacatctgttgtgacctcatgcatcaaaaaaaaatcccacatcagaaagccaactgattaacaaggactgggttagtatcttttatcaacacttcaggaaaaaagtctgtgagctttgctgagacacacatctgcttattccataaacagccccagcctttggagttaaataattaagttataatatgatgatggaatcataaataggctcctctaggacacaaaagagtgtgtttctggtcacatccacacattccttttacctggccccatatttggtttaaaacgtgttattctaaggaggtccgagaacgggatttgttttttgaatgaatgcacggaaatcagaaacaaggggctctcattggtttagtgctctttgttggtttcccccttccgtatgaagctgaagccagactggctctgataaacaattcccaatgtggcttcccctgatttcaaagtgctgggttattataaaggtctattaaggcaatttcagcctatcacaagtcaggttgattttctagtgcattaataatacaatgagattcatcttgacttctttctcttccttttagcttctcagtttctcctttctctgtatcctccaaacttcagctaacttcctactactcggcagctttagctccacatgatattttgtaagaaaatgagtcttggggagcacaagaaatgaatcaatggcttagaagaaaactttttttttttttttttttttttgagaaggaatctcactctcgcccaggctggagtgcagtggtgcaatctcagttcactgcaaccttcacctcccaggttcaagtgattctcctgcctctgcctcccaagtagttgggaccacaggtgtgccaccacgcccagctaattattatatttttagtagagacggggtttcaccatggtggccaggctggtctcaaactcctgacctcaggtgatccacacaccttggcctcccaaagtgctggaattacaggcatgagccaacacacccggccaaaaggagaattcttaaatcattggagaagtgatcatgtaagccaggcattgctgaccttcccacacctcaaatctgtatggcactctcctctgaacaaggcatattcagaagcacattatctagcacaattgagcaacactggcaattccaaaaaacagacagtgtttttgacttttccccccaaacaaaaagtttccttttttaacccgacaaccaagtggattcaagaaatagtctggtagatgtaaggaaagttaaagcattcccacattcatttccattctcttcctagtccccaaaaggaaccctgactaagtggcgaattccggccataaaaaaatggtaataataagtcataatctccaagaagtgtaaagggcctttctctttgggaaaaccctataaggtcccagttctcctccttccccttgggagagagaacataagagctacctagcagaaacatcaaagagcctgaggcctttaatgctatgagaaggggaaaacatgggttgaagatttcattctaatttaggaaaaacaaaaaaaaatatgacttaagtctttctttcttcattaagctgcatgaatacattctgtcaactgatagttcttcctgatccttaatttgaagtattgttacctaatataaaattacaccttttatcctttccaggggaatcactgccaccagccttgctccccgcttggtgtttacaacctttggaatagttgtaacttgtcacgtccccatctcagcctttgtttggcctacttttctaattttagctcttttaatcgctctcatctgaagcctgtccttcctcgtttctaattatactcctaacaaatactttttgatggatgttgatgaatgtaaaataaattaaaaatgattctcatgccaagatatctgtaaggctcagcccctcccctttccaggtcattgctcaaatgtcaagttcttagtaaagccttcctcgtctaccttgtttaaagtagatgtacacacacagagaagcataaacatacacaagtgcattgctcctgtgtattctataaccctttcttgctttatttccccatagcatttactctcatctaacctacaacacgttttacttgtttatattgcttattgtttgctctacccactagaactgtaaactccatgaaggtgaagagctttgcctgattgttcaccacagtatcctcagtgctcagaagactgcctcacacttagtagatgcttgacaagcctttattatacagcttaatttcatgaactccttaaccactcttactcagcagaaacagagcctccccagtagagctcttctaaaagacgtagaagtggtgaatgaattacaatcccaaacaagcaccaatggctgacactggacatcttatttccaaacctgtgatctgaaaagatagctgatttcccctcaacctttcttacctttcgcgatgccaagaactccatgcccttagccacttggaagctgtaacagatgagatgctccaaggtcaggaagtccttatacagatcttcaggagctgtccaaagaggcaggaggatggagatcagtatttccatgagttagtgtgatgtttctaagtttgctagagtaataatctttttaagacttgggagttaagtttttaggaaatagaagcagagagtcaatgcttctatcttctgtaaatctcctgaatcccagtatcattagccttcatcatacccccttaggaacaatactggtttttccattttagccaaattgaaccagtaaatccaggaggtagaataaggtaacactgacctagataatctgggaaataaagaggacatttccaaatttgccacttacactgttttttgtcatgtacccagagggataaacaatagtttcatatcaagaactctaaaaataaaacaacaatattcagggtcattgaatctcttctctccaggttttgtcctgggacaaaggccaaaagtcaaactataatctgcaatagataactaaaaatactagaaatatatttaattcattttcaaacttaaaaagtgctgtaaatacattaaatctggcctgggagggtgttttttcctgagagataacagaaacatggaaagataaatttacgtaaattggtggtatttacttcagtgcaactggtacaaataaacactaagatattaaatgggtgtttcaaaatcatctctttggtcagataagacttatggcttctttcctggagacaaataccagagtaaacaaaaacttagttgtagtaataaattcgtaagtatttaaaaggctgtgagcctttttctcaacaactcaatctcttaggtttctggctcactggccactgttttttgaaagacaaagagcagggtagaggcagcaccactcagtgtgggcccagctaaatgaagcctagaccacctccccatgtgcttctagaccaagtcccagcctcacactaccttctcagcttctaaggaaaaggagttaaatgcaaattctctctgtagcctcatgtcaagggaaacagagtgggtttcttccactattcttctagacttatgcctcaaggggagccagcctgtcacccatctctacatccacaacgctatctctgctccttctgaaggaggcagaaatacagtgtgtcctggagccggctgaagtcctggaagttaggctgggaccacagctccacccaaaaagagcactaaaatatcactcaggccaggcacggaggcttacgcctataatcccagcactttgggaggctgaggcaggcggatcacctgagatcaggagttcgagaccagcctggccaacatggtgaaaccccatctttactaaaaatacaaaaaaaaaaaaaattagctgggcatggtggaaggcacctgtaatcccagctactcggaaggctgaggcacaagaatcacttgaacccaaaaggcgaaggtttcagtgagccgagatcgcaccattgcactccagcctgggcaacagcatgagactccacctcaaaaaaataaaaataaacataaaaacaaataaataaaatatcactggaaacataacttaataaaggccaggatatttatcaagactcgcctgaggaagtatggttggaaggaagacttgataagccgcttggggtagggtagaaacaacagatggctcctaaactgcctttgagaaggttaggtataatgaaaagacttttgcacaggtaaagcatgcaacgtggggcaaaccactctggggctctccaaggcaatggagaggctagtcaactaccagaaaacttgtggcctctctcactaataaatgctgaaccagtattttaagaacactgctgtggttgtagccgactgcttagcccacttggactacccagatttctcaggctagccctgcttcacttcccagtctagggcttccacacttcacttttggggagacagaatggaggcagtctattatagaaattcaggtctctttcaaattatgaggtagtattggacttttcccatgatcaaattccttgtaacaccctatcaccctgtctgctctgacaagagcatgccatagcatgcaggaagcactagccagtaccttcctcttcttctacatcactgagggacttctcctccacaaatccagagctggctgagctctggctactggtgatgctgtccaagcgccgtttcagatccacagggattgctccaacgtagtctttcccttgacggaatcgtgcccctttggtctataaaaaagcaaaggaacaaacaaactccttgaacacaaaatgagtctttaaaagtttacaacctttaaaatgtagtaaaccatggagataattgaaactactaaaaagcagacaaggaggacatcaatttcaggattatgcaatctctgagctgaaacttggggcaagttttgtgcataatagggtttcttccacaaagcctagctccttctttagcttaaagtgacaaatgccacattttgagttgcattcagacacactttcagcattaggatgctcttcacagagggatttacactccacggggccaaatatggctaggggagagacagaataacccagagatgtcctaccctctgccctcccctttcctcgctcatacctgccttctcccccatgtccacactctgtaatgggtcagtagattaaaatcacatacataaaacagaaacatatggcccccagaaggtaaaagaggaagttacaacagccaagaggtaatatgagaagattcctcacaagttcttcacaaaatttcaactaaaaaactaacctgtaccattttgagtttcccttcattttataacatggccagagcaggattaggagatgacataccttgtaggggacaaattcatttctcttgctcctcaggtaagtggacaggtttccaaatttgcagaattccacaatcaccatgagtggccctgcaggcagcatgtccaggaaggaaaatgggttttcactcatattcctcactaagcgtttaatatagtgatgaacccaaaaacaccttagaagaaggctacaacctttcattgggacaggagtgtagaaatcagctggtcccaatccccttatattgtagcttttcttttttccagaacacattttcacaagattaaccaaaatttcagaagaaaacccacccatctacttgcttttcagtgcaatctcctgatatgattccattttgggggtaactacccttaagctttcaagttttagggaagtttactcttctctggacatctgttacacaagtaacaaactgtatcatagtagcatgacatttcttaattcagagaaagttttacaataatttaattctagtgccaattaaacctccatgaaatatatttattcctaggaatccgcaaagtattctaagctaagaaaatcaaggccagaggagttgactgctttccctcaaacactatcagagaggcatgttaaaattgggtgaccaaaaccacccacagttactcacctcctggcttggtacaggcacctagaaggttgaccacattgagatggtgaccaatatgaatgaggatcttgagttcagacatgagagctcgatgctcactgtgtgttgctccttctacaaatacagtacaaagagggaaatcataggtatgggacatttccttcaataattggggtccctccctccctgcatgccactatacaacttaccctccggggtaacacagctgtgacctagtttacagaccacatgcatttcctcaaaagtgaagtgtaaattctattttctaatttgaaataaaattcatattttaagtgagccagaaagtttgatatttaaaggaacccattgtgaaaccttttgcaaagcggagaatacatctgcagtggaatcatgcccagattctcttcttctgcaaaactggatttttgcatttcaggttcactatgattctgagggtctgatcatttcagcacttcctcataaggaagcaacaccatgtattaaatatcttcacgtgttaggggctataccgaatgttccagccaatctgtgccgatctgtgcaggcgaattaaggccagctggaaagaccagttggcacatgaggctgatggcactaagactatgtgtttgatcctgtatggactgctacacttcccactaattcacaggcatggtccacatctaaggctctgatgagccacctcaaaattacacactcccttggccacaagagaaaaaaggcagatggagaaagatagctttgaaatgcacaaaacctattggcaaagggtcattggcactgccttcatcaatgaaagaacatcacaattgaagaaagaagctttactgtctaacctcctaaaatgaaaatggccagaccagaattccgttactattagaattaacaattatttataaagcttttaatttaaaaaatataacccattatatttttttctaacacaaccattcttgttttgcaaattatcttttacatatgaacatcttttacatattccaattctggagaacatgctatttttgtatttcactatcttcctttccatgtctctagatggtctataattatctgattccacaatatattaagaaacaattttaatataaccacagtcctttttccctgtacccagaaccactaagtacaactgtgttggctgagccctgcacgagggtaaccaggcaagaaggtgaaagccattcccaactttgcttgccagaccatgcatcctggcataaagctacaaaggaggatcctttttccaatttgcacaagggcattatttaggctgactgcatgtgtggctagtaggcccacataagcacaaagctactgatacaagccttgcaacatatttaaagactagataaaacagaaagatagatcaccacataattttgcttttacctttcaacattttgactgctactgtcctgcaagttgctgtcttgtcaattccaaaggcatctgcttcaatcacttggccaaaggcaccacggccaagaggcttacctagagtcaacaacaacagcaacaagaaaacagacttggattactatacaaccaaagtgatacgcagagacatcaactagatagggtgaccatacatcccaatttaacatggatagtccagtttactcctttgtcctggcttaattatttaataactcccccttcactctccaaatgtcctgctttggatgattacatagggaccctacctctaagtggctatatgaatgattatacaaattcaagaaatggaattaatatttctaaaccagaatccaacatctgaatacaccacatttgtcatcattctaatggaggaagagatggcctggtaaacacaatatcaaattaatagcaattgaaaatgcacctagcttcagccggtctctggggaattcccatttgctggcatcataaggcagtcgttcacaatgttcatccaatgggagttcatctggatccatgacgatggacaagtagcctgtcttcagttcccctccattggcctggaaagcatcaatccttccagtcataaacacactgttgtttggctgttgttttgtgtgcttgttattgctgtttattggagcctcattcctgtctcattttccaataaaactcatggagtttgagagtggtcctattataaccctgcttctagtttcccttgtcccccaaaggagctcagaattaaggttttaaagcttaattacactagacagtccaagcccttttcctctctagtggcttctatcaattaaatccctgagatccagccaaaagaaagtgggcaggaacgttattgtattgaaataaaaatgtgcccattgagccaataacaatgggaagaaacaactcaaagaaccccagtcagttttcattaatcatgaaaaccaatgtgcatgggcagaagggaaattatttttttacccgcttaacggtccgtaggatgatgacaagaagtagccagaagaacatggcaatcaccgccgtgcctactagaataatgatttccaagttcgtcttttcctgggcacctggaaagacacaattgaatgagtatcaacagttggaaacttatactttttgtttgtaagatgacaaattttagcactaaagcaaaatcccaagcttaccaacttggaaaaatcctagaggacaacagttacacacccgtaacttgaatggagtctacagaattctttttttgaatttaatttatttatttatttatttatttatttatttatttatttatttatttttagagacagggtttctttctatgttccaggctggagtaccatgacacaatcatagcttattgcagcctccaattcctaggctcaagcgattctcccccctcagcctcccgagtagctgggactacaggtgcataccaccaagcccagctaatttttcttttattttctgtagagacagggtctcactacattgcccaggctagtctcgaactcctggcctctagccatcccccctgccttggcctcccaaagtgcagggattacaggcataagccaccacacctggcctacagaattgttaatggaaaatttaaagcttgcaaaacattgctcatgtaaacttacaacaataaaattcttaagtaattaagcatagaagtagtaatgtcttaaaagccaaacatagaaagtgtttagaggaagagcagtctttgatggaaagaaaacagatcattctctacagagaaaaaaaaatatttctatttgaggaaaacaaaagtcttcttttaaactgatagtcaatattttgatctgtgcagagtttgcaaaaggatcacataagaaaccaagtagggaaataaacaaaattttttgacctgagagttactaatgaccatgtatctactatgcactcatcactttaaatatgccattccacttaatctcctcaacaactctcagttttcagatgaagaaacagaagaccagagagcttaagctacttgactgagggcacacagctagtcagtggttcagtcaagagataaagaggcctgtccaacatgaactaaccattacatacactaccccatcccttgtggcaggagtctgagtgaggagaagaggaagagccaagatgagcacatcacgcatggcctggtaatgggagtttcaaatcactcatgaaaggaaagagaagaggaaactagaagtcagcaagcaaagctgcagatgctcagggcttcagaggacagctctgagtggaagaaacaaaatacagaaacaggctttccactaagagtgattagcaaagagatgataaggaagcagtcatcacttggggcctcccatcagaagagtgcaaggagaatcaaaccgggccacacgctgtgcggatggcccactacggcctcaagagagaagaagacaagtaagaaactggtttgcaaaataagtaacaaattggtttgcaaaataaaagttaacttaaccattgagagacaagcacaattatgcttggagtaaattttgtttctctggtggtcctagggaagtaattctctatttatacacacagatttaaaagtccagttgaacatagaggataaaaagttcaaagagtctgttttctatgtgtttgtatattaatattctcgcataacatttgggaacccagcaggagtattaaatatctagctctgcctttcttagcattcactccaggtaagaagtaactataatctctgtgccagtgttacctagttaggcatctgtaaccagctgcaggccaccaacaagaggtaatgcagagcatcagagacaatctagacgtcattctgcggatttgccctaaaacatgaatcactttggaaatgacaaaactgccatggtctttgaaatctttatttgcaagtgtagtttatgaaatgctaataagcttatacatttgaaaatatgtcaacatatctcgatgcaatacttggcatcatagatttggcagagtaaagggaccaaaatctagactttgagagacaagttaggatgagttcatagaaatccatcgatcccttctatcaccatacttctttcttacccttgcataccattcttttaccccacaacacagttttattctttccctggtgggctataaaaaaaaaagccataggaatatacttcttaagataaaatattctgccacaaattacttttcctagctaagaaaatgacagatttcacatcacttctgcatacacacgtattgagataaaaaccaaaaattttccatgtcagaagagcaatggtctattgttcacaagtgaatcttaattatctctagtccaattaaaactcggaatccttgtgactatctggatagcattgactgccatgattaggcagcaattctaatgtttttccaaataaatataaaggcatcatttctataagttaatcaagccattcaaacaaagacagaatcagggagaagaggctattcatcctgcctgattaagaatttttccacaataagaactgcaggaataggaaatgtgatgcaagcagaattataacaacattaattatgtttgctggttaaaagaatacatactcactgagaaaatttacaaagtacaaagaatattaaaaatcatctgtcgttgccctattcaaagtgaatgtgtgtctataagatacaaactaatcttcaaaaaccacaggatgtatctatgacttcccactgaccttctttttttcttttaagttccgggatacatgtgcagaatgctcaggtttgttacacaggtaaacatgtgccatggtgatttgctgcacctattaatccatctcctaggtattaagcccagcatgcattagctatttttcctgatgctctccttctccccaacccacagtaggccccagtgtgtgttgttcccttccctgtgtctatgtgttcacattgttcagctcccacttataagtgagaatgtgtggcgtttggttttctgttcctgtgttagtttgctgaggataatggcttccagctccatccatgcagctgcaaaggacatgatcagattcctttttacggctgcatagcattccatggtgtatatgtaccacatttttttttatcccactgaccttctattatgaaaaatgcctccacttttgcacagccaagaacactgcatgcctggcaggtgtagaggccttcgtcctccttcctcactctgcggatagtgaggttccggttcccatccttcaatacaatgcctaacagaggaagaaaacgatcattctcatttatgatgatgtagtctgtgaagtttttcagggaaatttagaaaatataaatgctgcccttcatcttgttctattatctaactctgtagagtcacatgggatctactgctgactaatctcctatatggctttcatgaaaattcaacagggccccatactccaattctaagtctgtgaaatgagccaggtcatggacaccaatactgctttttttctacattacatcaagaaataatatggctttttagataacatccctgggaaagttctgcaacccaagagtgatagccaaattctatttacctgagtcttctacaagggtctcattatctttaaaccacatgatctgtggagggggattcccagatgccgtgcatgagacttcgatgctttccccaatacttgtcgtctgattctccaggtttcctgtgatcgtgggtgccacacgctctagacacacaaaaagaaaatcacagaacatggaattataacttttgaaatggttctggtatcagcaaagttttaaacagtttaaatttagtaaaaaggaacttgttgatatattaacttctgggaaaatacactggtcactgggtaaagttaaatgaaacaagtcagtcaggacactgcaaacagattaatggcttttaacattcatattagtgatactagctggtaatcccatcacaaaagaaaggttcagggtcacctttatggatttttcctctaattagacacagcctccccaggtgaaaacttccctcccatgaagattctagtcaataataccctagaatcccttcaaatttctcttggaagtgccaaattttagtatcattcaaccaataatgccttacatttatttggcaattcttataaaacttgtttacacaatttgtgttcctcactagtgatcttatgtaatgagcagaataggactgttagcgttatctcacagatgaaataaatgatgttcagcgacattaaaccacttgtccatgtccctgcaactaagtaaacagttgaactgtttacagaatctggtgaggctaaaagaccagttcagtgctatttccactaaaacacaaacaaaacaacaataccctaagggaagtcttggatttaaagaaaatgaagcccatgagtatttgtttaagtgtacaagaacactttagatttattctttcttcagatcatcaaagtgctgtggaaatatcttgtcccaaccaactgaacatcaaaaggaatcatgctgaaaaaatccacgtcaacacttagcaaaatgagattacctcaacagcgtactacattgaagtctaagcaaatgtactggattctagcctatttctaagaataggttttaggaaaacaagttaggagtccttagggaagcaaagcagctaactgcgagcacatattttctgggcacagctaggccaggagcctacttcacatctctttctcaattctgccataaccttgaagccagacaagccaacagaaaatccatgtgatctatgtggtgtgacttgaaggatgctggggatgacttgaccccaaagtatctcttattatgacacctgagtcttaaaactagcgaactttatgctagtgtctgtcagaaggtgcctcttcaaatacgccaaggcctctgatgaagacgttaccctctaaaactgtggtatagatgaatttacttgggcaatttccttcctaacagtaaaaaaaaaacagagggcacatatatcctaggaattggaaagggacaccacaagaggagaaaatggagagaagtggcacaaagagacgctccccaaatttgcctgattttcccacagacaaagccatggctgcccagcttttgcacaaggcatgaggttagacaaggggtagacagtgcctctatggaggaatttacagagctatctgctcactgaagtgatcgtcccattgaccttgggctacgctggatcatgtgggatgacccagaggtacagacagtgaatgtagcttccttcccatggagtcttctaggtcttaaacgcagcccatcatcccactcttcatgcagcaggtgccttattgagcagttagtatatgctgctatgctctatgactagagctatagcagggagcaaaacagagaacaattcctgttctcatggacacagagacctcactgtgctgtgacttcccagtggttgcctatgttctcctcctttccttcatgtttaccactgtgaatttctgacactctcctagctcatagcaggcattccacaaatatttgtctatttaaataaatggatgcccaagataaggcagaagtttccctggttcaagctaatatcccttgcatatactagtgaattactccatcatcaggttttgttattttctcctttcgatatatcatttcattattattagcttctttcttcctcaaggactttcggtgaagaagtgtgcaccagtttacaacataatctcctagaggacagtaatctttgcatagcacctgaattgcactacatttaaggcattccaactgcctctgcacaatgatccagaattgtctccctacctaggactgtgagctgcctgaccacgcaatgtcttttcttggtcttcctgtcttgagcaaggcagacatagtctccttggtcctgcaaggatgcattcttaagctccatgatcaaaatgtcatttgtgctattagagaacatggtggcattcaatttccaaagagtatccaagttcttgcaaacaggtgtgggcaactctcccacatggattggcagaggctgtgggccaagcttgtaccatgtgaggttctcaaacgtagatctgtctgcagtgcaccacaaagacacgctctcctgctcagtgggctgcatgtcaggttgcaaagtaatttcaggaccccctaaaatgaagaggccatagttattgaatggtgatttaacttggtacagctcactatcatcttgctgctttcagactactacaaagtaccaaaagaaatgaagctctatccgttccaggtgatgtactacaacttgacaaacaaactagacaattcaggtcccaaaatatcttatttggccaaacacattacttgaaaatgtaaacgaattcctcagatatttaccacatctccactatgagctctacgcaatgtttaatatattaaaaatccaaagcaaaatctctaattctaacagaattttaaaattaggtcttcattaacactaacactcaatgatatgaaagctacatttatgccaatgaattagccctggctataatattccattcagcacaatcagctaaagcttatccataaaactaagatgcacaggcaaaatcggcagcattgggagggcactgctcctatgtccttctgattgcctccataaagcccaccctcatcaactgttccacagcaagcccaccaatatgtactgaagctcaataagccaggcactgtgccagactctgaagactgagatgtaaataccacacagagcttgtggtttaaagcatctgtgaaaccattctctctccagtgtagttagacgcactgacttcacataagcccaggagatacctgagaagttgtaatttatgaatgaaagcatcaatgatcaatccaagtcctctttcctaaatgccatgccactcacatgaatggcaaaaacaacagggaattacatagcttagtacccactgtgtgagtgatccaacccaaacctccagagaagagtacttactggtcacgtggaaggagatcaccctctctcctctcccgactttgttgaccgcttcacatttgtacaaagctgacacatttgccgcttggataacaagggtacttacagtctgtgcggggaaaaaacaaatcccaggccataaacaacgcggctgtttgtgcacaagcactcagtccagcagtctccacaatcactccaacctgcctatgccattcccacttctgcagcggttggacacgctcaaatttatgcaattgcaggttgagtatcccttactcaaaacgcttgggaccaaaagtggtttggattttggatttttttttttggattttggaatatttgcattgtatacttaccagttgagcatccctaatctgaaaatccaaaatgctccaacgagcgtttcctttgagcaccatgtcggcactcaaaaaggttcagaatctggagcattttggatttggggtttttaggtttgggatatttactcaatttgtataattatgctgctgtggagctcacacattatataaaaagggctttggaagccatgaaactaatgatgtgttttaatatgatatgatacacattttttcattctcatgtttataaaatcagaatcaccctacacagatgcatagatttaatgtcatagatgtttttatttttctctgataagctattaataagttaatggtactgctaaaagtcaatggtattttcaaagtgacttaatacgctctatttaatcatccagactatttgattattaatctccaatatgcctcacatattattgtaccatccttccattaaagagagagagattttcaaattttaaaacttcaaactcactttgttttttccttcaattagagcaaattgatttttattaacttcaattttatttcctccctggaagtcctccacacttctccattcttcacaagggtatgggtttgtcactgagacagcttggctataagaaagagataacagcgcatattatgatttaatttttctttaattagagtcaagagtaaggaaaagattcagactttggttattctgttcttagaaataacttccaacgcagcctaccatggtacaagacttggcgccaattaaaaataggcattgacaatgaaggaaaaggttctaggtagattcattcaggatacaggagggaagcagctattctgggaataaaccttcattcataaattggatcgacaagacaattcaagttaatttagttcaaaggaaggcaaggaaacttagaagccactgggctccttaaagtaatttctctgggaccatggtctctgtgaaggaaatgatcagcagctgaggaagaagctcatagtggccatttcaaaaacaacaacaggaagtggactgcttagggtggtggtgggttggctgctgttgttgtgtttttccctaaggatgtctggacttgtgtcagagcatgataagctgggcctgagaccctgaggactggggctgggtctatcactgcctctcatctatcagcatttcctctgagagatggatcttcacacacacaagaaggagggatgtggtattcaccagccgattggtatcgggagaaaaaccaaagactggcaattagcaaactgagcaaatagcctgtgtttggagaagtgtacctcacggctaacctaacaaggctgagcttagctaaccccaaaggaggatactccaagcaaagacatcccctaaaatgtaagacacagagaaagatggatggagattcaggctacctcttgagagaaaactttttttggtttaggcttctccatttaggatggagtcatatcatagctcagctgtaagaaatgcaagatggcaggaaagcaaagagcatgtggccttactcacctgggctcgttggcgcactcttcctccaactgccaataccagtggatgtgatgcgggggaggaatggcatagaccgtacatgtcagcgtttgagtggtgccgtactggtaggaatccacaggagagattagagatttctcaccaatctggggtgggactgaagatgggaaaaacaacttttgaattgtcagtcagctttgaagaatgggaaatagaggattttagcaactaaagctgactttctttaagcatatgattttgcttccactttctttttcgaagaacacctagatgtggaaacaagagacctgagttctagtgatactcataaaaataacaactagccaggcatgggggcttatgcctgtaatctcagtattttgggacgccaaggtaggtggatcgcttaagcccaggagatcaagaccagcctgggccacatggtgagaccccatctctaccaaaaaaaaaaaaaaggaataaagtaacgaaataaaataaaaatgacaataagctaataataataataaactaacaagctgaatgactttatggaagtgttgaaatcctgtgcctctcatctgtattacagagatagttctctctgtcctctcaagtttaggagatcagggaaaggctacagaaaacagctgaaatagcacagtaaatacatttattatgtgccaagcattgtttgaagtgctttgcatgaattcattcacttaatcctcacaaccactattactgtccacagctttatacgtgagaaaaaaatgaaacagaaaaaaatgactcgcccaaggtcactcagttaacgaacggcaaaacctggaacaaacctagacactctgacttctgaacccaaacacgtaaaccacctcatgttaaaggaaggtgtaaatctttagagaatgcattcctgccaccatcatctgagtttttcattctctctccctcttcctccctccctctccactccctttccctcttcccctttcttccttctcccttctctcacttccttctttcttctctccctttttcctttctttcttttttgactccaaagtcaaaactatttccttattactgtcaacctaaagcctcagattatgctttgaagacttgacttcttttttatgtttatttcatatagcagagaatttgctaaagtgaataaaatatttagtggcttcatgaactgatgaaatgggctatttgctgtccgtgttttgtttttatttcctgttcatttcctcctcccatcctacttatacactttccagtttctcctctccccagtcccctacacctatgctgcttctaaacaacctttttggaacctgttaactttttttttgagacggagttttgctcttgtcaccaggctggagtacaatggtgcgatctcggctatctgcaacctccacctcctgggttcaagtgattctcctgcctcagcctcccaagtagctgggattacaggtgcccaccaccatgcctggctaatttttatatttttagtagagacgggttttcatcatgttggccaggctggtctcgaactcctgacctcaggtgatccatccgcctcggcctcccaaagtgctgggattacagatgcaaaccacggcacccagcctatctttaaaatattccctgaaaaaaaataataaagccaagttcagcggcctacagaagagtatcaggacacgtagggaagcaccttaatgtcatgggaaaatatcctgaagttttaatatgccgtaccagaagggggaacaaagaattacaacagagaagcatttctcgaactgtttggagtgagagattaatgaatttgctcaggggaaaaaaggtgctctggtcaaataggtttgttaaaccttgaatactctatgtctctcctcctggagaataccaatatacattagcatataaaaggttctgcgaagtcctgcaataaagaaacctgttacacatctacacatcaccttagcacctctcacactcacttgaccatggcacccttctccccactccattccaaacacttatttgtacctttcagtttcagaaaacaaagttcaaattatctttacatcaaaaacttactatctttcctttacagactcaaaatcagatcctgaactcctgtcaaaaaggaaaaaagaaaagctcccaaccaagccaacagtgtcaacttcaaaagccttcagagttggaacgtgcctgcacatctctgatacatcaactacaatatcaaactagaagctttgcacaaaatctaaggagaagggtcttacacatctgtgtaccaggtgggcaattccatgagaggggaacatggtagtataacttagcttgacaactgtccctgtgggcattcttatttcacaacatttagctatcgagggtatcactactttaatcttgcatttgtccaccacaaagctcatttacacggcctcttaaacaaacatggccagagcacatggtcctacgtttcacttcagcttcaccacgccagatgacttttgtacacaggcccagccatgatatgagtgaagcagcaggaggcagaggaacggtggtttggctgatttggaagacaatgtatcataataaatcttgggcagagaggaaaattgaatggactcaccatacacaaccagagagaccacatggctctgcttctcctttgaaatgggattggtaaggatgacagtgtaatttcctgtgtctctttcactcacttccataatcgtcagtacatgccccgctttaattgtgtgattggactcaaggggtattccatttttatacctatgaaaaaaaattctcaggaattagtatagtcaaaggatttgctctcacacgaaatgatgctttgcatttatttccagtagttaccattttatttctgggggtgggtaaccaaggtacttcgcagggattctgacacgctcccccaccgtggcttccaccagagattccatgccacttccaaaagcaacaaaaggtttttctggaagaaaataaaaaaaaaaaaaaggtcaacttactgtaaatggtcatttgatttagtttttcatttcaagtgaaacgtcaaagaccttgagggtctgagtagctgcagttccaagatttcctgtactatctttcagtgggtcacttttcagcttctcccacacctcccgtgtttctcccacacctcctgtgtttgcatttgcttttctctccccgctagtgcactcccacaagcctagtgattgctcaagtctcaactcaaacacttgctcctctgtgcagctttctctaagtcccccagggatgcttgggtgctccttctcctctgctcccatgacagcctccacacacctcttccaccatgaggccccaggactcagtcctcagacctcctctttatttacaccttcctctagcctcaggtttaaagtatcattcacgtacctcctaaatgtgttatcttctgccctgactcctctgggttccgggttgatatgttaaatatctccacttggatgtttaacaggcatctccagataaacatatctaacactgtttccctaaatctcactgccttctcgatctttgccatctcagtaaataacaccatcatttactcagttgctcatgctaacgctcgagtcatcttccactctttttctcttatactccacaaccaatgaattgatcagcggaccctgttgactctaccttcaaaatatatccagaagcagatcacctctcactacctccacctcaactacccttgtctaagccacccctcaactctcacttggataactgcaattagcctcccaactgacctccttatttctgcccctatttccctgaagtattctggagaacaaaagtaattctataaaaacataagccagagcacatctctctctgtgtattttgacaagtgcatcttggcaagtgaaataatttaaataaatttaggacacttagtgatttctattttgttcattcagaagaaattttcaagttcttgctagggatgccacgtgacctagaggtcaagagcatagctttgtagtcaggaacttgagttccaatctcagcttcaaagatgagatgagctaataaagtaagtgctcactaaatcatacttgttatagttgttgccacttttatgattacaactctaataaatagcattatctaaggtatttttaaaatttcactgtattgatgcattctcataatataaactccaaaatcctttccaaggcttataagtaggatgccacacaaattaccatgtaaactcagacatttatgtaaatgaaagagaataaacaaaaaattaaggtgattttctcaaggccagttcaatttaattccagttcaattacagttgacccttaaataacacaaacttgaactacatgagtccacttataagcagattttcttccacctctgccacccctgagacagcaaaaccaccccctcctcttcccccttttcctcagcctactcaacgtgaagacaaggatgaagacctttatgatgatccacttacacttaatgaatagtaaatatattttctcttccttacaattttcttaataacattttcttttctctagctttattggaagaatacagtatataatacatataacatataaaatatgtgttaattgactgtttatgttatcagtagggcttccagtcaacagtaggccattagttatgttttgtggaagtcaaaagttataccttgatttttttttttttttttttgagaaggagtttcactcttgttgcccaggctggggtacaatggcacgatcttggctcactgcaacctccacctcctgggttcaagcaattctcctgcctcagcctcctgagtagctgggattacaagctcccaccaccacaccaggctaattttttggatttttagtagagatggggttccaccatgttgaccaggctggtttcgaactcctgatctcaggtgatccacccacctcagactcccaaagtgttgggattacaggcgtgagccaccgcgcccggcctatacatggatttttgactgcagaggagggaaagttaggggaactcccctgagttcccccaatccctgagttgctcacaggtcaactgtatattgctaaatgtttccccagtttgcaaagctcatgcttattcaagtaggcctctcagccttgcaataaaatgaaaatttaaaaactaccttagctaatactatttatcatagtaacaatcctaatagcagcaataactataataagtaatactaaatgaactcttactgtatatcagcacatctcatctttaaagttgaggtttgaacccaagttcctgactacaaagctatgctcttgacctctaggtcatgtggcctccctaacaagaaaaactagaaactatcttctgaatgaacaaaataggaatcactaagtgacctaaatttatttaaattatctcacttgtcaaggcacagaataatttccaagaccatagcttaccatggaccctgacaaatgtgctgttcttcttggtcatcagcccactggatgctgcacaggtgtacaatccttggtcactccgggttacaccatctatagttaaggtgctcaaaaatttcttcatctcactcccagactgggtttttaggtctcggtttacaagtttcttatgctgatgctgaaaaaaagagttgactgaacttccaaagcacagcatataacattacccaataacttctagtaacacacagaattaaatctgggctttggtaaacattatttaatgctaaaaacagggacaccagaacttttaacctcatgcagacaacaaatatattttgtttcaggagaaataaatggaaccaactgaattaggatttttaaaacctcacgtggtgaaagtgagatggatataaactgcagaaacacaagtaaatgtgaccactgtttaaggagcagtgtatctcatgccacctcttaaagagaaattcccttaaaaggaatgtagatcaaaaactttggagaacagagaaatgacataatgtggaaagatgtaatcacctagagaaaactaatattcatagcctggctattgcagaataggacaaaattcctggtatttcaccttttggtgggtgctatctgttctgcaattcccttaaattgtgtgtgtgtgtatgtgtgtgtgagtgggtgtgtatgtgtgtgtgtttaaggctcttacattttatctggccaaagaggcccctatctctcaagcaaacttcattggggcttattatctaagtatttggaggtctggctttgaatcattagcgttaccttcgaagaagggtattcccagttgaagtcaatccccacatttagttcagttcttgctgtacaatttaagacaagcttttctccaacagatagttcaattccatgagacggactcagaaccacatcataaatcctataccctagagcaagtaaattgaaaaaacagaacatgagagagcaaataagcctataactttgcacagatttattttttaaagtaatgcaactttaaaacatgccacattgtttttccctgcaggcctcaccaatacttggtagctcccaggaaaatggccaacagaggtttacaaagcactaccttcacagatctcaaagatgttgtaacccagtggacagaaaagtagtaaactttcagtggtcagtagccctaggccagtagggccagctttagcaaattgctgaagtttccataaaatagtcataattgaaataattgatagcaagcaatgctctgaacattgaattcttcataaaatgtgctcgagtaataccattcgctttcatcctttttttaaaaagttttctttttcttccttaatcttggcaagaaaagagacaacctcaattgcacatgggtttatttggtagagaagagcagatgaattgcccaacaccatatcctgagttcctatacttttcaatatccttcttcactctatgttgttatctccaagatcttaatacaaggatatgttattaatgatatggaaaggaaatgtcctcttacctacaacgacaactatgtacataatagactggtaactttcatcattaatttttgcttcacagaagaccatgccagcatagctgatcatgtagctgggaatagtaaagcccttcttgctgtcccaggaaattctgttaccatcaggaacaaatctcttttctgggtatctctgggtaataaaaagacatatcaaatatttaatccagtaccaaaaatgagagccatgtacaatgatcactgaagaattcatcttatttttaagaatactaattagttttattcattgcatttgacccttcctaaaggatccttaaaactcattgtgaatattataaacaggttacccatcttaatattagcttaaaattataaaaacttaagagacgattggaggagatgcaacttactgcacaaagtgacacgttgagatttgaaatggacccgagacatggaatcaccacagttttgtttttgttctcagtaatgtacacgactccatgttggtcactaacagaagcaataaatggagatctgtaatctagaagaaaatttagttttattaatgagttaatagtatttactagaaaagttggtcatttttcaggttcctaaactctaaccagacaagtgaatgactggaagggacacctcacacaaccaaaggcatccacagattattctgctgatagatatctgtgctacatgagggtgtgtgtgtatgtgtgtgtgtgtgtttgtgcatgcacatgcatgtgtatatatctgtgtgtataaaaattttgaaaaaaaactcccaattgagattgactcctttcacaaggtttattgacaagcagaatatatttttatagatttcacattttaaaagattaatcattataattttttcaaaatgaaggataatatttactttaaaatttaaagttaaatctatacactttaccgacaagttttactaatatttaaaatactcatgtgctctctctttaggtaaataatgtaaattccatgaaaataaatgaatggatcccaaaggatctttagattaacaggaaacagctaacacttttgaatttggttattcaagaggaccattcatgtgagcattttaagattctgaagactagggatatgattctttctaaaaccatgtttaattgtttttgcatttagtttaacatttagcagtcattgatatcttcaatgacaaacatttgaaaagtcaccactccaaagactgagaagaaaactgaagagattctgactgggttcttggctcacgcctgtaatcccagcactttgggaggctgaggcaggtggatcacttgaggtcaggagtttgagaccagcctgaccaacgtggcaaaaccccatctctacgaaaaatacaaaaaattagccaggcatgatggcacgcacctgtagtcccagctatttcagaggctgaggcaggagaatcatttgaaccggggggcagaagttgcagtgagctgagatagcaccactgcactttagcctgggcaacaagagcaaaactccgtctcaaaaaaaaaaaaaaaaaaagatttcaaggccaatcaaacattactcatacaatgttaacatgctgctggaaacctagtccattcctcagagatagagatgatgtggtgtggagtcatgcttgaaatctcagagagataacatttcacattgctatgcccaacacatctcatcaagcattctcagagtgcttcataatagtcagtcaaagtgaagaaagagttaattaaaccacaggggacaaaggcagctaattccctgcaacagcagaagtttgatttccttcccagctggaaagcacagaaaagcagccaatctagcccaccacatgccatagccattatcttatgaggccagggctcacttcctggctccatccattgctgaagagaatggggtcagaagactagggaagtaaggtggcgaccagaggggacattaaacacctatccatagagaatacttcagtgtttcctttcccattgtttaacttcatggccaaaatcttggacagcccaactcctagaactttaagcttagacaggaagcagaatttaatggtatacccaaagacaggcagtgtaccaataaacagtgctagggattgccacttcttaatattgcctacctttcatccacatgttatgaaatattacataacttgcttacagagcaagcctttggaagctaaattaaccctttgacgtaagactaaacctatttagtaaatcaattctatttcggtatctcaaaaaaaggaaataaacaaaagaaacccaaaccaccacccagcctctcaaaataaaatatttactgaaactcatgaaatgaattttcacatgtctccaagtttcctgacttaggaagaagtaaataatgagatatgggggatgttcatcttgtagtatttctagacaggctgaaagcaggaaatccttgcaatcttctgaccgagctgcatctctcaagactgccaggtcaaaaggagccagaaattctccaagatgtgagccttgtctctttcaaatcttgtggagggaaggaggagggcacagaattctatctttgacagtgcttactctgggcaaagatatttctcaaacattgtgaatccagtggcataggttattttgatgtggtctccactttttcattgcactgaccatattacactactgaaatgtaagcagagatatgcaagtgtgtttcccaaagctgatgaaattcttgccctgtaaaagctgcttctgggaaaaaagtctaagtcatcttcacctgtctcaaatactctgggatgtaaaaaggcatatacgtaaatacataaaatgtctgtttatcttcactgaaaagaaaaatatttggtacatccaaccaaactatgatgcagcccttacattccttaaatttatatcatagggatctcattagttaagttaggttttcacagaaaagataagatagtgtaagatttttgaaacacaaaagaatgcataactcattataaatgcagaatatgtgtgacatttattttatactatatggatgttaagtcagccttcataatatcaatcccaaactgcacatcctagaaagatacagcatatcatccaagatctcagaccaaacaagcaaaggaaagaaacattgtcctgaaaagagtctgaagcaatgtctttatttgcacatgagtatgggaattgttttttatgaaatactagtaagaaaaaaaggttcctatgtgcaaaaaactccagagcccttggcaaaaaatgctttcctatgcattcttgggaaaatctcctactctgctgtagataacttatctctccacagaaatttctccataattcacccccaaatcttcctcgatttcaagaattttaggttttcttctcaaacataggaagactttttataagtctcaatggccaacagtgaacacagatttaccttggaaacaaagatcagacccaaactaactgggcaaaaaagaggtaacacggcccaagctccagaatcaatgagtcttatttctcagagaaagcctcaggagagaagaattgtgtgtattcctcttggcaaacagcctttagagcaagccctttgttgtactcaattcttctttgagcctattgtcttttataactggtaaagagacgtgggaaatgaattttatttcaccacttaccttgaacatagacataaatgaccgaggccaagtcagtttcccggtagaagcacttgtaggctccagtgtcatttccgatcacttttggaattgtgagtgtcttacagaagaggccatcgctgcactcagtcacctccaccctttgctcactgccactctgattattgggccaaagccagtccaagtccctctgtcccctgaaaaattaatttcagggaggtattaatatgaagtgccagactgtgaggctatttctaagaaaagagaaaatttggttttgaaacttaaataaactcttcaacagacacagtcagtcttctaccggccaggcatggtggctcatgcctataatcccagcactttgggaggccgaggcggatggatcacctgaggccaggagttcgagaccaggctgggcaacatggtaaaaccctgtctctactaaaaatacaaaaatgagccaggtgtggtggcgcatgcctgtaatcccagctactcaggaggctgaggcatgagaattgcttgaacccgggaggtggaggttgcagtgagccaaaatcacaccactgcacttcagcctgggcaagagggcaaccctgcctcaaaaaaaaaaaaacaaagtcttctaccaacaagtcagattgacatatgatgaaaagttataaactcagcttcagaagtcacttataaagattcctgagttttccattaattaatgcattctttctttcaacaaatatctattaagcatctactatgtgccaaacttgttaaggactagagaaagagcagtgaacaaatcagacaaaaatcaatgcctttatggaacctcagtctaactggagaaaacaggcaattaaaaagtaaggaaagtttattgtataaaagatagtgtttagtactatggagaaaaatatagaagatacaaagaaaagagtaaagaattttgcaggaggtggtcttgataaagctagccataggaacatcatgaagagcagtattacaggagcaaaaacagcacatggaaaggccctggagcaggtgcatatctggagtattaagggaacagccaggaaaccagagcagccaggtaagagtgagcaaaggggagtaagaagtgaggttaggaaggaaggaggtgcaagtaagagtccctcaggaccttgtaaggacctcgcattaaaacatagatggcttgtactgcagcatttctctacaaggccccaaggaagataagaagatagtcaacatcaagaagaatgtaacattattggcccttcattcaaagaacttaaaatttccaggaagttgcagctaaatcaatgaagttacttttaacacactccatggtttttttcagaacataagaaatgtttatgcagagttttaaaaagggagcatgggatccttggggatttcaaataaccttgttatcgagggtcggtaaaaggaaaatctaatgggaaatgtgtcttaaacaagtaaagctagagaaacagcacctgctactgtgttttttcccaagggctgggtattggtaaggggctagggtattctttatactgcagtctaaaatagatgtatgtcattcggtttaatgcttagtattcaacaagtatgaagcaatggcaataacctacccaaggtcctttgtggacccccagcactcttccaggagggtaacatcacctccacttgtcacagtctctaccaaaaacacacaggtcctaagaaggctccatgcctttcgtgtgtgatcactatgttaaacccaagggtcttctatctttcatcctggggtaagggttgaaaggcaaaatttaaaggcctcttcttcttgacaaagaagtctacttctccagttatcaaaaatcaatagcatgacttcttgctagcaagtggggaaagatgcattccagaatatcaaggcagggcccgaagtccattatttatgtagatcatgcgctcagtaatattacccactaaatattaaattgctattaaatattactgcctaagtaattatagtaataaatttcttataaagcaaagtttttggaaagggataataagtgttcaagaatcataccaagcataataaatatagtcccaaattttttcaactctattccttaaatgtatgccctcaacttcatttattcattcatatttattgagcgtatgtctactatacgccaggtggctgtactggttattggaatgtgggtgtgtgtgtgtatttgtgtgcgtgtgtgtgtgtgtgtgtgtgtatgcatgttggcagagaatagtataaaaacaccagcaaaattgtacagaatttttgagagaaaattcttctcattttccattattacatcagttcttagaaacctcaccacttatgaacaattactacaagctctattataattctgctctactggaaattatttccactcaataaacaatcagttacttaacacaagaaatctagatctagaatgaatccttacctgcaagtaatttgaagagttgtattagccttaattgtaagtatgtctttttgtatgctgagcctgggcagatcaagagaaacactaggcaaacctagaaacaaattaaataaatgaatgtagttgccactgagttagacctaataggaaacaccttccataaacaatgcatactctatactttaaaaggcctcttcagcaattcattgtataaaactgggaatttacttttcaccattctcagtaaaagttcacaagctgtgtcataacaggaagaatgggcagatggtcataaaccaacacaacagttctgcaattcatggagctagggtggagttcctgttttcctgcattgccaacttcaaggtcttacaaaaggatacgggacattgaaaccaaatgaaccttcatctgatgatctcactcccttgggaaaggacccactgacatttcttatagaacataggatgtacacatttgactaaattgctgattaacgaatcccacttagacggatttttatatagttcatctacgtaccctgaagggagtgagagaatctatgaccttgtctcattttcctttatcaattttctagtgcgcttcccctggtaaccaaactgccacagctgaaataatggctcataaagactgtacattaaaagcaagggagagaaactgaggaagagaaaacattccccaattccacacatacatgcatattaatatacttttatgtatgtgtggaattttcccaattttacacatatgtgcaaattaatatacttttctgtctactgtaattcattagcattaccctttttttaaaaagtatatgaatattttcgtgaaaaattttcccagtttcacacatacatgcaaactaatgtacttttctctctattgtaattcattagcattacccttttttaaaaacgtatataaatttttttaagtgcaatgctaatgaattacaattgggagatctgaacttattcatcaaagccctgaactcatcctgacatcaagcttcagacataagaaacttgtctttacctataagggataagaaccagaaaagtaccatggcatagattcctcaccatgggtcactctacagcaagataactgaattctctgtcaactaaatgtgaagagctatgaggtgttgaaaaagcatgagagaaagaaaaattgtccactatgctagggtcttaataaatatcaagacctagaaaataccagctttaaaaaagtaattgatgttgggcaggcacccaagctttctaagtcatatcaactaagaaaaaatgactccctaggcctaaactggcattgaccttgctgggcaaataagagagtatgaacaaataggacgaagtatgagacggaataaatagagagagtataagtaaatacccagtgcaaacatccagtgcattgaatctgaggatcccaatatgaacaaatgcaggcaaaatgaataagtgactgcacatgttctcacacaccacacagatgtgcaaaataagttactgacataactggtcaatatcatggtttttaagtcaataatatggtttttaaaaaactggaaactaagttatatcaatatatctcagaaattaactggcattggtactgacttatgtttagaacagttttgttcttaagactttagactctgtcagaatatccctgggtctacaaatctgcattttaacaagcatttcaaattatcctaccacagatggtctatgggccactcttggacagttgctggtctgggtggtcatgtttaattaatttgcacagtactttgtgcgtggaacgggggttacatttatgttttaaatagagaatggggtctcgctatgttgcccaggcacttcttgaactcctggactcaagcgatcctcctgcctctgcttccctaagtgctgggattacaggaatgagccactgcacccagcctgcacagtactttttaatatgaaagaaataactgcccccaaaacaggcaaacaaaaaaccaaaatgtttaaaagcaaaatgaaacctggagtcccactttgtctaagaaaaggaaaatgaaaacaattcatttggataacacagatttcaaacttgactggggaacactaggttgagaaagatgctgaaaacatgatgtacaattcacactgccatccaaatgagaaaaaaaccattatttgggcacattcttgtgagaaaacaaatggcagtaaaaatgattctcaataaactgtgcccactcggctaccaaaatcagaaactcttgaaggtctctcataatttattgccacagatcacattctagacacactttcctgtgtaacaaatattttaaaaaagaaaaggtatgtccttcattcataggaagctgagacaatgccatactattctagagacacgtttacaacaaaaatctattcaacaaggctctcaataacttcaaattcatatttgtagaccaacatagttttttgttttttgtttttgctccattaaatgtcattcgttttcattggcaagcttgagctggactcttcagaaagttctaaagaaataactgtaagaggtacatatgctactactcaataaaaagcccttctatgttcaaatcccataaccaatattaattaatttgtgcactgttacccttccagctcaaagacgggaaggaaaaacaacagtgcctctgtctctagaatttgatggcaccaattacagcccaatccaattaagcaagtaatgcactccaaaagggcaagttcaccattatattcagggcgaccggcctgccgttactactacgctaggaaacaccccaggcttaaaagcaactcacttctttgtggaatacagagcaaccacatgttccagaccttcattctctgcccagaaagggggagagagagggcttgtctgggacaaatgagtgtccatggtggactggacccgttgaaccaagtcattataaagaaaattcagtaaccatggacagatgatcctggtactgtatgtgggtgtgagtgtcttctaagacatgtgattcttgtcttaggaagtaagaaatttttttccctgaattattcgactttttttttttctttctctgaccctttcccctttctcaccctgcaaagggtggaaatctggatatcagcaaactggctgcaggaaagaaatattatctaaggggttgagagagaaaggaaagtgaggaagaaaagacagacagctattgcatgaagaacgtgtgtgttcctaattgaaggagacggaaattttaggcggcagggagaggaaggaatggcactaaagctaggtaccaaggcccacaggaaaggttttcggagcttgaacttctgactatgcgcttacaccaaggaccacagcgctttgaaagatgtgcaatgctttacgcaggacagttggctgttacttggagacccttggggaagctgtcaaagcccccaggacaagtccctattcccccccttcttcgctctgcaaggagagcggcgtcctgcaccaaggaaggaaaaaaagtttctctccgctccagaccccacttcacacagtgggtgtgcaagtgtgttcgagcatgaagacaacaacgggccgggtcccgcaaagaggcagaaccgagtgtaccgtccgatccgggagacccggcctgagattccggcaaggttttcttccccgggcccggactaggatgttgcgcgcagccagacaacttttcaccgccttttctcgcctgcggaggcacctcctgcctgccaaccccaggcgccttcccaccccagcctcccaagagcctgagggtgtgtcggcatctcaggacacgctccagccgaggtccctgtcgcaaaccagagtcctagaaaaggaactgggctagagcacaggcgaccacagactcgctgggtaatcttgggccagtctctgagcctcagtttccccactggtaaatgaaagatcgcaaaatgtcaagtcctgtccaactctccagctctacgattccgagttagatctggctttcaggtcctctccgccctcacccgacctgtctgccttcctcctccagagtgggctccttacccacagaggcggcccgggtctccacgcagagccacagggcgacggccagcagcaccttgctctgcatcctgcacctcgagccgggcgaaatgcccagaactcgggagccggttctttctcccagcgcctgtctagagaaggaggcgcggaggtggaactcgcggcaccccgcagcgcaggacagttgagcgcacagggctagggagcccgggcgccgaccgcggctgcaggggcgtctgcgggtgccggtaggagaggatatccaggctgccagacggactttctgcggcgcgcaagtgatgcccggcgcaggcagaggaaacgcagcgaccacacactgaccgctctcccggggtcccgggactcagtgcagggtgggagctggagccgaaactctagagcgcggaggcggggccatgcggggcggggccggagcggaggaggggctctcccgtgcggccagccccgcccctcacccgggtacccggcggcgatctccagctccccaagcccatttacatctccccatttccccacacaactggactgcgctgggccccaagtcgcccaggagagaacatcccagagcaacaactttgtttctggtgtaaataaaaagtactcggtaacgggcgctgagcaactccaagatttaatcgcttgccggtccccgaaatttggggagcatcaccaggagcgctgcgaagagcagcgctccctcaccaggcgcgtcaaagtgcaggaccctcttcgccatcgcgcgcgtctgaagtggccgagaatctgcagcagtttggagccacaagggagaagcggatactcagccaagtatgccgggtcgcaagctggcagcgactcctgccagtagttttggtttttgtataagggtattttgtttggccagtataattgtagtttaaaaagctgaatctggttgctcttaatcagaaaacgcacttgcccagttcgccaacattcccgctatttcccaaaatatttggcggctccaagtttgaagtgacctgcctagccccaagaaggcttttgtccatcgtgctccccaacgaagagccctagtgaaagtttggccatgccccttttcagagcagagcttccagccaagatatccttaggcccaggggaaggaggccagctgccagcgtgcttcagtggaggagcaatgaagcaaaagcacctaggacactctgtgaccaaattgcacaactgtctccacgtgtgtggacttcttgtggcagctgtttggaggggaactccaattccttcctgaccacattcgttccttctggttttctgtccatatctccccacacctggggagtgacatcaaatgtcccctaacttcattaaatatgaatcttccagatgcctatgtcttttacctcccagaggtgctttttaatgacaacctaaaggaccattcttcaccaagataaacacacagaattattatatctacacctaattcaaactagattgattgtatacaattaatgtaacctgttacttatcttcatctgtttttaaatatttactgtattcacgcttttacttttccaagttgacaggtgaaatattttaatgctgaaatataatgaatgtatatggcaaaaaaaaattttggaaaaacacaaaaaggcttagagtgaaaagacttttcttttggcagaggcatttttatgtttccttttttttccaagcagattcttaaacacaagtatgtagacatgtcacccttctcttcccacaattgcttggtataaatgctatttgagccttggcttttttccctttaaatttgatttatttatttgagacaaggtctcactatgttgcccaggctggtctccaatgcctggactcagtccatcctcctgcctcagtctcccaaagtgctgggattacaagcacgagccaccctgcccagccttcactttataatatacactggagattcgttctacatcaacctttaaagctccatcttttatttatttatttatttatttatttatttatttatttatttatttttatatagaggcagggtctcactatgttgcctaagctggctgcgaacaaagctccatccttccatcttttcaatgttggcatagtgctctactatatagatgtactcatatttatctgggaggtatttatttggggaggggagagaatctttaaagaaactcctctcttcctgctagtaaactcagcaaataaaataggatggactctggcaaagttggataaaggggtgggagatggaacctggtttggagagggcagtttttctccatccccatcaccaaacaattccctatcagccttatttacagttcatgacacttcctcttccatgtctcatttaagaagatagtgtctcctctgaatgcaaaccagaacctgcaggcccgtggtaatagccccctttagaagtcttggaggaaatgatgcgtctttgatggccgcaagaccagaatttggcagagtctcaatgaaatcagtctaccacattccctcccacacagcacttagaagtgccttaggttcacaaaaaaaatggcaaagtctgttaaaaaaaaaaaagatagaaaagaaagaaagaaaggctgttccatgtgcagcaccctctcgttatctggcattgcaaaggagtgacttttgtgagttaacccaacagtaaggcacctagcaaagtgccccaaatgtgttgagtgttccatagatgctattcagatgccacagcagagtagtagctaagtgcacagactctggattttattcccagatctaccgcttatgatctgtgtgatctttaccaacttacaagtaacttatctatgaaacacaaaaaaaattataatagtaccttcttcatagggttcttacaagaattaaaggagttactgcatgtaaggcacttggagtaggccccaacacagctagtaaagatcttggacatagaaagcaccagatacacattaagaaacattctgcaaaggttgcttatactacaatgcatgggcttcttcatgctgctgagatctaaactgctaagcaggctcattcattcaacagtttttgagcacctactatatgctaggcattgaaccaggaactggggttacgatggtgaaaataatgtcaagatgagcttaaatgaggaatcattgtaatagcctcacccaagacaaatttaatttaatctttaagcacttcttgtctccagctacttttctgggcttgtacatacagaatatacattgttcatactcaaagcacactgcataaattactctccatgatctccaaatttggttacattaccaacagtattttggactccatgtcttaacaagttatatgaagatttgtcaaaggttaataactgtggaagttcaattgcttcaaagagaataaaatacccaggaatccaacttacaggggatgtgaaggacctcttcaagaagaactacaaaccattgctcaatgaaataaaagaggacacaaacaaatggaagaacattccatgttcatggataggaagaatcaatatcgtgaaaatggccatactgcccaaggtaatttgtagattcaataccatccccatcaagctaccaatgactttcttcacagaattggaaaaaactactttaaagttcatatggaaccaaaaaagagcctgaattgccaagacaaatctaagccaaaagaacaaagctggaggcatcatgctacctgacttcaaactatactacaaggctacagtaaccaaaacagcatggtactggtaccaaaacagagatatagaccaatggaacagaacagaacatgcagaaataataccacacatctacaaccatctgatcttcaacaaacctgacagaaacaagcaatggggaaaggattccctatttaataaatggtgctgggaaaactggctagccatatgtagaaagctgaaactggatcccttccttacaccttatacaaaaattaattcaagatggattaaagacttaaatgtcagacctaaaaccataaaaaccctagaagaaaacctaggcaataccattcaggacataggcatgggcaaggacttcatgactaaaacaccaaaagcaatggcaacaaaagccaaaattgacaaatgggatctcattaaactaaagagcttctgcacagcaaaagaaactaccatcagagtgaacagacaacctacagaatgggagaaaatttttgcaatctactcatctgacaaagggctaatatccagaatctgcaaagaactcaaacaaatttacaagaaaaaaacaaacaatcgcatcaaaaagtgggcaaaggacatgaacagacacttctcaaaagaagacatttatgcagccaacagacacatgagaaaatgctcatcatcactggtcatcagagaaatgcaaatcaaaaccacaatgagataccatctcacaccagttagaatggcaatcattaaaaagtcaggaaacaacaggtgctagagagcatgtggagaaataggaacactttcacactgttggtgggactgtaaactagttcaaccattgtggaagacagtgtggcaattcctcaaggatctaaactagaaataccatttgacccagccatcccattactgggtatatacccaaaggattataaatcatgctgctataaagacacatgcacatgtatgtttattgcggcactattcacaatagcaaagacttggaaccaacccaaatatccatcaatgatagactggattaagaaaatgtggcacatatacaccatggaatactatgcagccataaaaaaggatgagttcatgtcttttgtagggacatggatgaagctggaaaccatcattctcagcaaactatcgcaaggacaaaaaaccaaacaccacatgttctcactcataggtgggaactgaacaatgagaacacatggacacaggaaggggaacatcacactcctgggcctgttgtggggtggggggaggggggagggatagcagtaggggatatacctaatgtaaatgacgagttaatgggtacagcacaccaacatggcacatatatacatatgtaacaaacctgcacattaaacctagaacttaaagtataattttaaaaaaattaaaaaaaataactgtggaagttgaacagtggtacttaaagattcatttgactattctctctacttttacgtgtttgaaagtttccatgattaaaaaaaaaaaaatctgttttaaatgactgtaatcaaagggatgcccaggccaatacaacactaacttttccattgtcttttccttgatttggtgaaaataaggatttggaatgtccttgagcattatcttttaatcatttcaggcagcagcttcatcatttgtcaatgaaaataataattcttacctaccttaaggactgttacgagactcagatgagatcatctcatggaagtgctctataaagtgtaaaatggtgatggtggtaataaggattcaatagatgtttaattttcttccttaaagtacttgttaccaaggcctttcatcaggtgtcttccacacataccttcatcgcctaagaacatcagctgttcaaaaatatttcctggccaggtatggtggctcatgcctgtaatcccagcagtttaggaggctgaggcaggaggattgcttgatgccaggaggctgaggctgcagtgagctatgattgcaccacagcattccaccctgggtgacagagtgacacactgactaaaaaaaaagatagtattttctatatttctttgagatatagatatagatatagagaagagatacatggagacatacatgcataatagaaaattttgcagaaaatatctagaagggtacacaccaaaaaaatacctaccttggggaaatgattgaggcacagaggcagagggatgagaacatgtactttttgcttcatatatttctataatttttttcaaaccaagaaagtattacttttacaaataaaaaatattataaaagacatcaactctcttttctaggggctgttatatttttaaatatgaccatttattgattacatgtttgcattgacaactttgtcatgtttactgtatttttctttccatgttcatttattttcaacttaccagagcctatgactacctcaccagatgttggctcagtttcacagcccatccatacttacaactattgcgccttgggagatcatgagcataccctttgtttctcattatctaccttctttaaacatctaagtttattttactccctgtgagatttattcatttaacttaagctatatttgtatgttcaagaaaaagaaggctatgtcaccacaaagccaggcctgccttgaatgtgtccaacagtgttcaattttattcacaaagccttatattctagtaaatataaagcaaactctccatccttttagtgaaagagattaaagagaacttgattacttgctccctgcaaaggaaaaaaatctcagttactataaacacgtataactatgttccagtcccaaactctcccgtataatttcttggaatatctcacatgagaatagatacaataatttttaaatgtgtaaaatatgcaaagaatttaaataaccaactgaaagtccacacagcaccagagaagggtgctaaaaaatattaagagctaacactttttgagcacatcatttgagcaggctctgttctgagtactttatttctcatttcatcctcataacatcccatgaggtggcaagcactattagtattccttagaaagaaaagaagtaaagagaaaaaatatttattcttaatttaagtaaatgtccctttgccttcctaaaagtcttgcccaaaaaaaaagttgttatatctctttgtaaataatcaatgaagttttttcatcaataattaggaatatggtaaaaaaaaaaaacagggcattctttgcttttttcaataacaataaaaagaaggggtagatttttggagcagttactatgtgtcaggtattttccttggattatcttatttaatgcacataataactcaatagaaaagatactataattattcccatttaagggagatgggaaaatgaggtttagaaagtttttttttttttttttttttttttttttttttgagacggagtctcgctctgtcgcccaggccggactgcggactgcagtggcgcaatctcggctcactgcaagctccgcttcccgggttcacgccattctcctgcctcagcctcccgagtagctgggactacaggcgcccgccaccgcgcccggctaattttttgtatttttagtagagacggggtttcaccttgttagccaggatggtctcgatctcctgacctcatgatccacccgcctcggcctcccaaagtgctgggattacaggcgtgagccaccgcgcccggccgaggtttagaaagtttaagtaacttttccaatgtcccataactgtaagtggtggaatcaggacttaaaagcagagcagtattaagcacccaaaacagacccctcctagcacatacaaatagctttttgtttttggttttttgtttttttgaggactaatctcattcaaggcatgaggctaagtgaattgatgccactgacttcctctgcctctccataacaatagcttccattttcctagatgcatgaaaagctaagtgacttagaagaggcactctgagatggctgaccaaggaagaatgcaaagcaggtaattagatcttgccctccccacctgcagaatcccagccgcattgaatatttaccttccacccaacccccaaaccacagatcttctcttcaaaaaaaaaacaacaaaaaaaaaaacaaaaaaaaggagcagttgcttctatacaaataatcacttgcgcatttggggcatttcttttctaccatgaatttttgtcatttgtcctcctggacataccttccatacccagtgcaaatatctgtcccaagtgatatgttttgtttttttattcagctgtctgcttcaattcagactcttctaggagaaataggcaaaggtaaatcttacctgagcaagtagttaagtttggaaggatagttggtaaggtctaataaaaacggttaaggacatgatgatggtgcctattaataaaatctattttgtatactatagacttattgtgttatgtctaattaaataaagctattgtaaagatacttgggttaatgttatatgtgctagctatataaaatgtactttatatgattattcttaaattcaaatttagataatagtcatccatttaataaatatatccagttatgctgaatttatacttgatcattgacaaattaatgtggactattttgttattcacagaactaggaaattattttccttttcctgtacacacatagcacttatgcaacatctgatagcataatcacatatttattcaaatatttctccctcaaatcagggattaggtcacattgattttgtattctccgtgcctaacacagtccctgtgcatattcacctctaaacacaataatgatgtccaagttatttttgttatttccatttctgctgctatttgttcctcctttgctttttatttttccagaatcacatgcctcttgactattcattgcaaatgtctttacagagagcaacttgtgggaataaatggaaccatacaatgtcaacatagacacaacggagtgaaagagttagttcttaatttattaagcagtggggattgaagatttttgtttttgattttgagtacaatgaagaaaaagaaataaagcatttacaagatttgcatgtactatacaagaaacgtgtgattgaaatgttgcatctgtgtcatttgcagactcgtaaccattttccagtgaattaataccatcctccccctttaagcctatcaagttttcaaagaactgaatagtgcaaaaatatacttttggttcccagagaagtgctacagattaccattcccatataagaagaatgtatacacttccaggttagttgaattagtttgcaatactgttcacatttttagagactaaaaataatgtttcctggtaatgccacttcaccagtgttgagagcaagtcaatgacagcagaaaagttttatgttctttgtatataaatttagtctccagagtttccaaaacattggtgaatagtccctggaggcataaataaaatttttttctttgagcagtgtttctgaacgttcatttctaatatatcactgccttgcttcacttaattaaaaaaaaatctccgcaaggaatgcctcacaaagagagaaatttcaaaataaaatgaaaaatacaactttagatctaattgataatcatccaataattggtcaggctggtcataggcagatgaaaggctgtaagggagtcatttcatgcatctgatcacataatataaataaaagatccagctgtggagaaaatgattctagtaacaaagcaccacatcaaaaatattccacattaaaatggtctttggatatatagaaaaatgcttctatttccttatcctaagaaaacttgaccttgctgctccctgaagctacttagtagtctagtactttgacctttccttcaaacgagttcttgaaagataaaaggacatccctcaccttctctcctcatgtacaataacttcttactcttgactctgcccagcatctccacaacagacatcccattgtccaccctcttcttgaacttccgtctttgttgaagcttgaaacattcatgggtacactcctacctaccagccaatgcccttcactggctgacattcctttgctcaaccctaaacatagggatcgccaaatccattcttggtcaccatcccttgtactcttccatgactttctcaggaattgtatttcctcttttgcctttgactatcttccttatggagaaaacttgaaaaattgtgctctccaactctgattttctaccctagctccagcctctaatctctaattcttcctggacatctctgtgtatgttccaccaatttcttaaattcaaagtgccaaaaactgaattctttgtctgtttatacccaccctgcctccttcagccttcttaagctcgaagtccctctagatgcttatactacattccatgatatccccctgccttttcttttcctctcaaatccaattttgtctacattctttacttccctcatatccatctcctattttcattcatcagactgccctgactcgtgaccagtttgcctttttc

SEQ ID NO: 97 - DNA, 75127 bp, Homo sapiens
ggctcttaggcttacccaaatcagtcctccttctgtctggagaggtggggttgggaagtcagaagagtggaggtcaggaattcaggaaaagggaaagaagtcatttatttgcttcgttttgcctttttccagtgtaattgattttaagatagaactgaaagaatattcaacacacactctctctcttttttttttttccttaaacagaactttattttctcacagttctggaggctagaagttcaagatcaagatgtctgcaggtttgctttcttctgaggcctccctcctggcaggcctctttgcagatggccaccttctcactgtgttctcacagggtctttcttctgtgcctgtccctcgcagcagtctctcccggctctcttttgaaggagattggagtgcagaattggctagtctgaggtttcagtgtgcaagacgtagtcagatggctcacatttggaaccctggtagtaatgttttattctttgtccgatggcattgggcgggttgacccagcctgcagtcaggatttccttgtaccgttcacccgggagttcagaatcgcactctggctgaaagttcagcaagagcaccattgtcagcctgactgccctgtcttgctggaccagccaaaagcttagttactttctggcacagttggaggaaggagctggttcttaacagacgttcaattaggtcttttggctttctgtgttctttcaagcttcttccttttcctttgtaaataatgttagtattgaaagaatagattttgccaagtgattgtcttgtgtctgctgcccacttggcatgaaggtaactgctggtgaattgggggaaaaaaactaaacatttagaacaagcctgtccaacccacggtctgtgggccacatgtggcccaggacagctttgaatgcagcccaacacaaattcttaaactttcttaaaacattatgagatttttttaatgatattttttaagctcatcagctattgttagtgttagtgtattttatgtgtggcccaagaccattcttcttcttcctcttaaggcccagggaagccaaaacattggacacccctggcttagaaccttcagctctgttccggtggtacaggaccagttaggaggcatcaggttctaaccatctggtcataagggaacagatgcgaggcctggtcacagtaacagcccgtgcagagatcaataggaggaaatcaggaatccactgagggtctggggatctaggtagtgtgggctgcaaagcattttcagaggttagtgactctccttttgtttcctgctgggctgtgagccctggcggcttgatgcatccgtgtgtcttgcccactgtgctgccactgggtgggcgtgctcaggaattgaatgggcctgttgagaaagatataaccagcacttttgggaagagtcagccaccctttttctttttgttttgggcctgttagaacagtgggtctcaatctgactacatattaggatcatctggggggccttaaaaatgaaagctctcacctgacagtgtgtaggtcagccacccaaaggtgagggctgtgcactcggcgcagaccttgacacttaggtccaaagcgcgagtgctcttcgccaaagcttgtctgcctgggctctttcctacctttgggtggtctgttcacaatgaccctttctctgaccagctgattgaaacctgccttctgattgtacctgggtaattggaacagaaccaggagtcatggttagcttgtagggctgcctgcatggctcatgagcagtataactggttgttaacggtccctgtcatgtgaggttttgggggtctgcttcccagacgagctcactgtgcttggacctactctatgcaatggataatcgaactaattatttagataattaagtggctgggcacagtggctcatgcctgtaatcgcagcatgttgggaggctgaggtgggcagatcacttaagcccaggagttggagaccagcctaggtaacatagaccttgtcttcacaaaaaaaaaaaaaaaaaaaaaaaaaaagaaaaaaagttagggcatggtcacatgcctgtagtcctagctactctgaaggctgaggcaggaggaccacttgagccaaggagttcgtggttatagtgggctatgatcaactactgcactcaagcctggacagcagagcaacaccctctcttaaagaaaaaaaaagataattaagctacaagccacatttatttgaaacattctccgtggatgatctgggtatttgattttgaatccttcaagtaaatttctcagttccttaacgtgcatatgtaaacgatcatgagtcatctttggttattaaaaataacccaaaccacagtgattgaagccttgacatgctttctttttcttggtgagattttcctggattgtcagctccttcccccttcctccccgtacgtgctttcagtgagacggaacagttcatttcttccttgactacaattgaataaacatttcgtaatgacattaaaaagtattgacttttgtgtcataagtaccagcatttgcagcattttctgactgcatcgttgcacttatgttttctcaatttgtaggtcctgctgccgtgaccagccagtctcctgttccatgtaaactctgtatcctttactaaggtgtggcaccgtgcacaacagggcaagtggtcaccctcagagagtggtcctgaagtcctcctccgggcagctgtgaataacactccgagagccaccccgcaggcagcttccctgactgtccaggggcctcgcgtttagcgtggactcagtacatggtgggcaggggcgagtgctagcggaaactgggtttgctttttgttttcatcttttcctggtttagaatttcctataacatgtggattcttcatcttggattgtctttcaacctgacatcattatcagcgcaagccaaggtaggtcagcggggacagttgtcgtgttacaacatggtgcttgttgactttggatcccagttgtagccagggacgttttcaaggtgaatctcttagaaatgacccctcctttcaagcgtgggaatgggatttttttttttcactttatacgttttttactatatgtgcattttatcaagaacatatactacttttaataattaaagcaacaactaagaatgccattctcctgcttaagcccattctggaaaagccagactccaccccagggtggatggaaagccggactccaccccagggtgtctccctcatttctcccatcgaccttcccaccggtgtccgtgcccttttctgttctgcatgagcccgggaggtgtgctcctctttctggccttgctgaggaagcctcctcagtctgttaattgtctcttcctgggtaatttctttattagagaaatcttttttttttttttttttttttttgagacggagttttgctcgttgcccaggctggagtgcaatggcgtgatcttggctcactgcaacctccgcctcccgggttcaagcgattctcctgcctcagcctcctgaatagctgggattacaggcatgtgccaccacgcccagctaattttgtatttttagtagagacgaggtttttccatgttggtcaggctggtctcaaactcccaacctcaggtgatccgcctgcctcggcctcccaaagtgctgggattacaggcatgagccactgtgcccggcctaaagaaatcttatttttttaaggcagggtcttgctccgtcacccagcctggagtgcagtagtgctatctcagcttactgcagccttgagctcctgggctcaggcgatcctcctgcttcagcctcccaagtagctgggcctacaggcgcacatcaccacgcccagttaatttattataataataataataattattttgagacggaatctcgctttgtcaccaggctggagtgcaatggtgccatctcggctcactgcaacctccaactcctgggtttaagcgattctcctgcctcagcctccccagtagctgggattacaggcatgcgccaccacacccagctaatttttgtatttttagtagatacggggtttcaccatgttggccaggatggtctcgatctcctgacctcgtgatctgcccacctcagcctcccaaagtgctgggattacaggtgtgagccaccacagccggcctataattttttttttgtagagacagggtcttgccatgttgcccctgtgtctctaatacctcgccaggctggttattagagaatctcctatgttactctttaatcctctgtgtattttcctgcctttcctctggaattcctaagaactcttgaggagagaattagccctgatgctgtaggcatccactgtatgtaatgcattgttgtgccttgtctgtaacccatagcctcatgtgacatccactgtatgtatgtaatgaagtcatttctctcctgtgcatctcgctggtgttttcctgtacagctgctctgtacctgccttgggccaactgaaaagggggtcacccagatgattttttatgtggcacttcattctcctgtggcatcccaattgggaaaggccacaccagatgctggcagtgtgggtgatcagtacatttatgggtcgatgaatggatgagttatgatgttccattgagagcctctggagttaccttttaaactaatgagctgttgtaggagaaaccaaagcacaggactgaagttgatgccacgtgttgacatctttttctattttaaacgttaaaagaggggctaggtctagggaagtccccgtttggaatgaaggactaggagctacacctttgatgtgcccctgaatgcagaggttacttggaaaagagtcagccaggtgtgcggtggttgggctgtcatcctcctgtggtagacacgctcctgaattgctcctgaatggctcagctctgctttggttaggaaggaaaagctacactgactgtactttgcggctttttatcaccacctgccacccgccccgcagatgtttaggggaaccacttttgggcttttgttacggtttgcatcatactgttttatttgctgcctcttaaaatccaggttacctctggaacctccaagtgaaacttgagcccatagtaaatctcttaccagacaaaggaagactcatggactttctcctccagagaaaggaatgcaagatggtcatcctgtctgtctgttcacagagtaagttgaatccttcccccttgctctgattccagtgtgaggcctgtgctgcccaacactttttatcgggatgtgggctacattgttgtgtcttgtctgtgacccacagcctcattctttatgtgaggggtggctatgtgaccccctaggaaaggctgctaaatggaaagatgatttgtagagatactggtagaaaagaacaataaatgggatggttctgaatgaaagtgggcacacaggaggggagtgggccaccacccctggccttcacacacacctctttcaaaatccaagccactcactgcatatgtgtcttctttaagaatcccctactgaggccaggcatggtggctcatgcttataatcccagcactctgggaggctgaagcaggaggattgcctgagcctaggagttcgagaccagcctggacgacaacatggcaaaaccctgtctctacaaaaaaaaaaaaaaaaaaaaaaaaaattagctgagtttggtggtatacacctgtggccccagctactccagaggctgccgagggaggattccttgagcccgggaggacgaggctgcagcgagccgtttgtgtcagtgtacctccagcctgggcgacagagcaagaccctgtatccaaaaaaaaataataataataatcccctaccaatatgtgctgttggtgtttgtttttgttttggtatagatggggtcttgccttgttgcccaggctggtctcaaactcccagcgttaagtgatccttctgcctcggcctacccaaagtgctgggattataggcatgtgccactgagcctggcctgctatagcttttttttttttttttttttttaaccgtaaccagaaaggggttgcgaatgacatctagctgtcaggtctttaaagtattgtatttcttagagtgtcctttaaaggtacttttgcattggtaaccttttgagattagtttttatcatagcaacgtgtggaaattctgaagctgacatgaagttggtttgatccgtgtgtgaacattgtgcctttccagtgttaagtgagtcagacagagcatcgctgcccgtgatagccactgtttttgataaactcaaccatgagtataaaaagtacctggatgccgagcagagttatgcgatggtgagttacatggagtatgacaaagggtcctcctcccccaccccctcccgggtattttctaagtaattatgatgcaaaattgtttcctatatattagaataaggtcgctgagatttgccgcctgccatagggcaaggtggcagtagtgggggatagtggaggagtagtaaattcagggtccctgcatcccacgagctggcggctgcatctcacttcataccttcactgtttttgtttttcccatctgtgtttgatcttgcctgtagatccttggtctactgttatagatgagaaaaatcagtctctgctttgcaatattttgtatatttttctgttatgccagagtgaggacttagaaaattaaattagaaatatttatatttgccacacctttcttcccttttgggaaagaatcctgttgagatagtgacgattcagtgttagcacttagcaggcgtgtttgtagtcaaggtaataaccatggcttatcgccaccaattcccgctgtattacttgtacatcatatcttctgaagccagaagaaaagtttaggacaaggagaatgaattatttcaattccaggatctgattagtcctaggctgaaaatggttttaaaccaacaaaagccccagaactccactcccctttagctgttcatggaagggtaagaggtctgagacaggcactgaagagggccagttgctgggacagtgtccattcctacgctgccagacgtgagggatggctgagtccttttggactctattgctgtgggtgttctgggctgtgggaatcagtaggtctgatcccaaatggcagtttctgtgccgtcccacacggtctgctgggctccataaaccgtcatgactcagcagtgtgggccactgaccagccacatgagcagcatctggagtttcttggaaatgcaagttctcaggctacaccccacagctattgcataatctgcacggatctgaactgcttttttttttttgagacggagttttgttcttattgcccaggctggagtgcaatggtgagatcttggctcaccgcaacctctgcctcctgggttcaagggattctcctgcctcagcctcctgagtagctgggattacaggcatgcgcacaggaaaaagttgtatctaagtagagaaagtgttttccgctcatatcctgggtccacatcgaagaattcagtccttgtggatgaactgtaaacagcacccttcctctaagatgccgaagatcatagtttgtggtttttttctttcaggcggtggaagcagggcagagccgaagcagcccgctcctcaagaggccggtgcggacccaggcggtgctggaccagtcagatgtgtacacccatgtcctgtcagccttcgtggaaaagaaggtgggccgcagctttccgcctcttctggactgagaatgctcaaaacaaggaagttgctgaaaacgaggagacttcatgtgattagagtcacttgaagtgattagaatcactggagtttccttgggtgaggccctagagctggtagtttggcttctaatgctgaggcctaaagcataattgttgacgggtggttctggagcgatgtgtgcaaaaccagtgaaagatgaacactgggccattttaagatggaaacaaggtgggggttggatagagagttatatgcagcctcttttgcacctcgttggtatttgtaagaccacatttttttctccctaggagatgcctcataaatttgtgatagccgtgctgatggaatacattcgttctcttaaccagtttcagattgcagtacaggtaccttcaaatcatctgggcccaagttaaaacagaaggaatttaaaaaaaaaacacagtcactgtcttagaagatgactcatatgctaagacaggtctgcctccctgactcagaatgctgagtgactcctgacattattagttggaatgggaagtgtaaggtcaagttggggtctttacctgcatgacgaaaccacttcttgtaatgacagacttttactgtgttggttagaatagccagtccttggggagcctctagtctgttgtagctgaatgatttggaagtgttctttcactttttacttttgtcctcagcattacctacatgaacttgttatcaaaacccttgtccagcacaacctcttttatatgctgcatcagttcctgcagtaccacgtcctcagcgactccaaacctttggtatgcattgccagatttttacttccattgtggttaaaaatggaaaattttaaccgttatctttccaactgaagtgggtctaaaaatgtctttcaggcttgtctgctgttatccctagagagtttctatcctcctgctcatcagctatctctggacatgctgaaggtaactctgatgtgtgaggttttagactatggaaactaactctgttcctgttgtttgcactgacctggacttctctcccttactgctagcgactttcaacagcaaatgatgaaatagtagaagttctcctttccaaacaccaagtgttagctgccttaaggtttatccggggcattggtggccatgacaacatttctgcacgaaaatttttagatgctgcaaagcagactgaagacaacatgcttttctatacaatattccgcttttttgaacagcgaaaccagcgtttgcgagggagccccaatttcacaccaggtgagaatgcaatgaaaagacttggggtaaccatagcctcaaagagtagcagagggcactggcagctggtgggcgaggaccctgggttagcatttttgtaaacaacacaatttgataacagcccacctagcccttggcccattatttgtagtagagtgaattcagtatactgacagaatctgaattatgctctggaactcaccgaggaggtgtgttttgagtcaagacacatttaggacccagatcaggcacagcccatctcttatagcagatcttggaatatctcttaaagccaggaataagacggcaaatggtggctaagggttttaaagggtctggggcttattaaggtttcagttttatgaagtatacattggttgatcattctcattttttttttgagacagagtctcgctccgttgcccaggctggagtgcagtggtgtgatctcggttcactgcaacctccgctgggttcaagcgattcttctgcctcagcctcctgagtagttgggactacaggtgcgtgccaccacacccggctgatttttgtatttttagtagagatggggttttactatattgtccaggctggtctcaaactcctgacctcatgatccgcctgcctcagcctcccaaagtgctgggattacaggtttgagccaccgcacctggccctggttgatcattctcatctccaaatagttatacaacctaagacatcatctttaggatagggaaggatcagggctgtctaatgaaacttctaggtctatttctagctcaatgtaagacggcatttagttaccataaggacaggttagatagaatctcttccatttagcttttgtatttgtctctcaaagcagatagggtaaccccaaaacttaggaaaacaatgtattttattaaagaaaaataagttaaaacccagtagacacacctacgagatgctttctttgtccctcatttcatgccacatctaactggcaattaaatctcttcctttctaggggaacactgtgaagaacatgttgcttttttcaaacagatttttggagaccaagctctaatgaggcctacaacattctgaaatcacttgctgtttttttatataaaaatgtgtacaaagttaatttattgcattaataaagctctttaaactataaaatgttataaagtgtatctacaacctcaactgtcactaaaaatatggtatagaacttgtgggatggcttactcctaaaaggagagacagacagtgcattgattggcctttacagagtgtcagtgagcggatcacattcacagccatctagtgtcacctcctgcttgccaaagaatgaggtttctttcctgaagaggctgggagaagtttagtgtcctgtggttgcctccagatctagtaatactgcttcccaagtcaactgtgcattcctgagttcacaggcgctacgttcaaagctgctgccaaacaaccgatggttggcaccatccggtgttcaacttggccttgccgatgcagcacccgtccagtggtaaaccgaccgacccttagacacagttcagtcaggatgccctgcgagagggctagaaatttagaagccgttcgcgctctgttcctttgtatcgctcttcagtggcacaacttttggctttatttactgatggccctatgagagagagagactttttcttatttctgcaggagaaagggagctagttggctgggcatagtggctcacgcctgtaatcccactttggaagactgaggcaggagaattgcttgagaccagcctggacaacagagtgagaccacatctctctccctctcttttggagatgggctctttgctttcttcctcaggctgcagtgcagtggtatgaacacgactcactgcatcctaagcccacccttctgggctcaagcaagcttcctgcctcagcctaacaagtaggtgggactgcagacgcacaccacttcacctggctaattttatttttgtagagatggaggcctcactatgttgcctaggctggtctcaaacgattctcctgtctcagccttccaaagtgctcatctcttttttttttttttttttcttaaaaggaactagtatattagattgtaatagaactactttctatcccccggagatgataaaaagcccctcattttcttaatcttctacttcagtgcttcaatttagtgacaaagctataaatgaagcaaatcagtattgttctttcaaccgtgggtcatttttgtgcaaggtgaagtggccatagaagtaaaaggatcaaggacagtctcgagatgaagaaaggcagcaagcactttgctaagaaacgggaaatccatgagggacataaaaagctgttctgcagcactgctggtgtgagagctggctgccagatggactccttcatctcagtggcagggaggagctgccctgcctgctgacactcagatccattcaaggactggctccaggcctttgtgaagcagacagatcaggcctccagaaaaaacatcgacaacttcctaataaagtagtctgcaccatcatgaatcccctggatgggttttttcttttagaagaaatttttttactcagtatcatttatcattatcaaatgaccattagtatgagttcaaatacttgaaaagaatgcctcaggatagaattccctttcagtaatgtccttctattgtgccacccttttaagatgagaactcttacctatgtaactgagtaagacagggagaaatattaatccgtgagtggctcccagtaagaccatggccaaatacatcctgaagtagaatatctggaaaatttgagatttggcaaaagccaacaccacaatccctccaaattttgtaagtgtgattccactgaacacctaaaagaagagatactgtgttagaaaccacttttaccaacctgtaattgaacaaaaacacttccttacaaggatttctcccaggttcaagtgattctcctgccccagcctcctgagtagctgggattaaacaggtgcacgccaccatgcctggctaatttttgtgtttttagtagagatggggtttcaccatgttggccatggtctcgaacccctggccgcaagtggtccgccagccttggcctcccaaagtgctggggttataggcatgagccaccgtggccagcccttatggggatttcttaatattcaaggttcaaagcaatgggaactgaacccaggtagcatcatctactacctaacactatttgctgccttatgatcctgggggagaggtatgaccaagttaaaagctgtgtattctgcacagacactgcatcgtgtctcccaattgattatctttctttatattctcaggtgaaaacttaaatatttaaaagtgttacgaaacaaagttttagtttttactctttaccaggtattttctacagtggtaaagagataggctaagccagggtgtagagttgaaccaagacgactctccaggcaccaaccgcacatcacacgctgggttctggcccgggctcccctgcattttaaatgggaaagactgccagctgtctcatgtttaacttgtctgttattttcctgcttcagcacactgccacctaaaaaggagccgtaccaacaggtacagttccacagaacgtccgttctgtccacgatgtggcagctaattcatgaattgcctgaaagcttgcaatccttagaagctgctttgtaagtacaggatccagactcttcagtcactgaggaggattactttgtggtgcgactctgccggcgtggccctgctcagggtactcacggagctgcccatgtgggcaagtgcctcttccgcgcgctccacgcggctgcctttcatgctcaccgtgaacgctctggttatgtggctgcagaactccacggagatgccacagctctgaaataaagcacttcctttaggatggctctcttcctgttgaagaccctaggcagccaccccgttctgaggatgggtgctaattacccagggcaccctgggtgctagaggaggccaagcatcccattggacttacaaggcctccatcacaccaatcttactgtaccaggaactttttggggccctctctacacacagccaaaagcctggttttctgtggcacgtttgtgttgaccaggagaaattgctggaacccgttaaggtcaccccacccgcaccgagctggcgcattgtcacaacttcttttcttggacctcagtgctcccctatctgaagcagggctcatatctgagagtacggatacactgttctattttccatgaataccttctcgagtgctctcatctttaatgattaaaagtacctgataaccacataggaggcaaaaggcactggtcggagagctcctggggcggggtgcaattttctaagtaaaaagtgaacatcctgctgtcatcaggctacaggcttgtgcaatctctaaagaataacaaattacaggcagactagcccagaactaggccaggaaatcacatttccatggtcagaggcaccatcaggtatactagtatagccgcaaggaatgggacaagagaaaaaattgaacagaaattgcctgtaatgtgcctatgctcccagatgtccaactcaatgctcgctccctctatgccctgtcccaccaccatccagcactcctccagcactcatcctgcctctccatgtgtgccaagagcaagcgccagacttggtatcttactccatctttagggtttacatggaatctaagacagccaattcccccaagtgaaacaggagctagggacaaactgagactgtatgaggactcaccatcaccaggttgaccaaggatacagcgttcagactgatgccccagagccacataactccaaacatgttgaccaagaccatggcgatggtggcacacatgatgactgcagaccagagctcacagcccaggaggaccatggtcaccagaaatatcgcgcccagggacacaccgaggttgaagatagtgtcgtcaatgatggtcaggtactgttcgtagaagacataaaacacactggaggggagaggggaggcctcattaaagctcgctctcactcccgaacactgcgtgttcatcctgtcaccactgccaagtggtcagactcctttgggaaacatcccttgcagaaaaccttgctggctgtctacaagactcaccgaaagcaactcacttgacctctcatggccactgaccacccagagaagggcccagcagtgatgcaaaatgtatatttttgataaagtttctgtttataagcccaatctatgctattttatagacatttacagagagcattccacagcattctgaaaaaacacaaaaaaacaaagaatcctgatctatcctgagacactacctcaggctcagcggggtccgtgcaaggcctgaggaaaacatgctttcatttattttctgccagagctaaccggctcttaacttcttccaaacaaatccaggccttcctgctttaagcgagatcatggggaggcaggaaaaataaatcacttgtttctcctacctttctacagtttctaaattcagtagttcatacataatacttttcttcctgggaaaaaaaacccctaacaatataaaaagtctacatacaggcagcatcccaaataaccagcagttagggattctggttcattgttggccaagaatgtgggccgggccctgctctgagccgcctgctctccaagcgccccctgccttaagccattttccagtgtgtgtctcttgcagctgtgcagtggcgcagagatcaagttttgcgtctctagccctcaggccttcacagagactttagattctgaactcctttgcccagcacccatttcctttgatatactgccctgtgctcagaatggagcaggggccagaacccaacctgaaaatcagcatcttgccaagggaaccctccccactcccacccagtgtaggccctttgctgggtaaaccccattgaaaaagggcaggctttacctgtaaggaaatactcggtaggcactgccgttaatgcccatggtttcggtgacattactggctataagtcgggctttcttcagagcgtcaataaagtcagcagaggtctgcagcacggtgtggtaggtcatgaagtacgtggctccgaccctggtgccatggccaaggaggatgttaactgcagaactataggcagcatgtcccctgaggaaagaatcctgggtgtcaagagagtccaggtcttgcaaaatatcagcagaatctgagcacttgaggctaagcaaaatcacctgaccctggactcagaggtcagacccagctgtacatttcagggatgaagaaggcccccagataagggaacaccaaaggtttagcttgttctctcccagactggcttctttttttttttattttgagacagagtcttgctctgtagcccaggctggagtgcagtggcgtgatctcggctcactgcaacctccacctcccgggttcaagcaattctccctgcctcagcctcccgaatagctgggattacaggcacctgccaccacgctcaactaacttttgtatttttttagtagagacagggttttgccatgttggcctggctagtcttgaactcctgaggtgatctcaggtgatccgcccacctcggcctccaaaagtactgggattacaggtgtgagccacttcgcctggccagatgggcttttctcgattgctctgggttctttggtacatagctgctgtttctccacctggtttcatgtataatcaaaggtacagggtttactcagtcctgttgtgtaataggaagcaggaaagggcaagggccctgggaacaacctcagccctgccacttactggtcatgtaaccccgagcaaaatgaccacctctgagccccagtctcctcttctgtaaatgggtataccaccacctactcataggctgcgtgatgagaaatggaataatgtcagggagtgcctggcatgacgctggcaccctggaggctccccaggaacggtggctactgccttcagaaaaactgaatctacttcaacttattttacgtaggccaaagcatccagtcagtgagtaaatcaagctgcaagattcatttctacttaacttttaggaggagtcatcccatgatacctcgaataggtctcaaagcacatgcatgatataaatgattcactgatatgactctggtcagatgtatgttcttatgaaaaacctaagttcagggtttacctaacatacatggggatactcatcttccacctcccaaagcttccaaatcaaggccagagacttccggtcatcatcactatttttgggccatatatctggcttccgtgggtaactggctgcctggctggatgggggagtgagatagcccataaccctatacatggatgggctggcaaggagcatgacgaggctaaaagaatcgcaaccttaatgtgggataatgttactaaagctaagatcacgccccagctgccatcagtacaagtgaacaggccaagttccttcaggcctggattaccagcaggccgtcctctccctcagccccgcttggaatgtgcacaggaatctgcgttcattctcatgcccagggggccaggacacagagagagcatgagatgtgaatgcccacgctaagacagaatcagttgaacactatgaggcattttcttaaaaaggtgttttcggttttcctgcttccaccaaaggaccaggacagggtggggcggagaagagacgttcccatgcaactgtcttagcccagtcctctcctagttttctactgcaaattaaagttgcagtggatgcttatctgcaatggcagcagcacttaccctttgccacacttggggttagggttatccgaaaggaacatgggcaggaatctcatgaagtctcccccctgaggcctctgtttgccttccggagtcagaggcctgcagcgaacgcaggcagggtcaaccactggcggagacatgcagggaggactgttagaagaataggtctccagattttttgtaaaacattttaaaatactgacagtgaggggcattactttcttctctatcgattactttccttactagtgagggataatctttccccttatctaaaagcttcagccacatgtcactttcacagtttaatgaatctgaaataccattttcatcttaggcatactatgcatcattttctgccctgaagtagatctcctccttcaagtatggccttgactggtcagagcccggggcttctatgtttttattaagaaaattccagggcaacctcgacgctcctacaaaaccacagggtaaagtgataaagaaaagccctcctctgagaagctaaggccagataccaatcctgagaggcaatcgctggagttagaacaggatgagaaaccttatgtggaaaccacactccgaacatgtggaccttgttcagcttgcagccccgagggtggctgtctgagccaggaacaacatgacaatttcagaatgaatgactgaggaaaggaatgatgacacagggagacccagctttgatatacaaataggtataaactgaggcacgatgcaaatgatttttaaatgataatttgaaaatttttcagcaaaacaggaaagatttggtaaaggagaaggtacctgaagcattgcagaactggtcagtgatattgtccactcgacagcaagacgactgtggcttcacccagtcgaaataatcgtcgatccaggacgagggggcgaagcctattcgggtactagagaggacagacagggttactgacctgctccacagggaggaagtctttagtttcagtactttttcttaaaacctaacttccttttctacgttttatactgctaacagtcaaaagaaaaactacatgagcacttaatgaaaaaagccttcaaagtattaggtggtaaattagtcctttcaaaggttttttaaggtaaagccagatttaacatacattttgcataaaaacaacttttccaagaaagtctattttcagtgagacatttcaggcctgagctgactgcctggctgagagcctcctccgctgcttctgaagtacaagacaaggtggtactgactagttgtccagctgcgccgcgttaaatatctgctgcaccagggaatcattgttgcagcccatgccgccgcacaccatgttctgccccttggaagaagtgtagtcgtgcccttcctccaggacaaagtacacaggcggacccgcatgcaggtactgactgatggatttgaaataatccaccatgtaggagtcctgaaagaaagataaaagaataggagagagtgtgaacactctgatagtaactaagcaaggcgaggatcatggagaataagagggtgccaggaggttcctggctgagatgcctccagctggactcatgattcctaacaccaccagtcttccccccagggccccagggtgctcctcctgctagccccacaatcaggagagcatctcataaagtaacctcataagactagttattcgtgttctgcagctgtgcccagaggggctcagtcagaatgccagacagcccacaccagcagtgcactgcgacagttctcctaaccctggaaaccctgtcaccatttgcagttagaagcaggcacttgcttgaaacacctacgtgcatgttttgaaaaatgtattcatcatcagctaaagaagttaaaaaaaaaaaaaaaaggaagtcatcttacatctggcatcgaaagagactgatccaatccaatatctactttgttcaggactgcgatgctgaatgacagaacacccacaaatattgctatctggaacaacaaatgaatcataagacagagactgcttagtaaataagcttacgaccagaaataaaatcttaagcacacacaaaaagcaggattttttaaaatggaaaagcttaaatgacaggctaatagggagtacagggcagtgggtgagaccacagcaccaggagtccaaattcctgggtgcaaatcctgactctgccacttacgggctgagtgacttggggcaaaccacttcacctctcttggcttctatttcctcattattaagaggaaaaataaaagtttctttgcaactttctgtgaatctgaaactatttcaaaataaaaaacttaaaactcttgtttatatggactgataaaagctcacgggaaaaacattttatctactgttccacatttgcttttgctttttttttagatacattttaacagctttaagaatctccttcccaggctgtctggcttcttagaaggcatgtgataatctgtttcagtgagaggaaagagaaaaaccacagataagcgcataccacaattggtctcatccagtcctttagcagaagtggagaataggagtttttgaagaagcgaaacaaacagctctctgaggcctggacgcttgttccatcttcagcacctctgacacagcaaaagatgtctagccgatttttctgaggggacagagggaaacaaaggttatacccgctagctgcttcctctagattctagactcaaattaaatagactataatcctggcaccaacttacctcttgacgtttaatgtctaaccccaagagactcacgaaacaggtaatctgcagaagaaagtcaatgaagactgccaatcccgcaaagagagagaaggtgtgcacggctggcatcacggacaatgctcctgtcggggagagaagggctctgcgtcacttctgtttacagccgggggctctctgcaggtcttatgttcatgtgcatgtacagatacaaggagccagcacaggccaaacgcatgagaaggcatgctgcggctggacattacaccagaagtgggacaggaggtgataagccagtgcttttcaaagcacactcagcaccagaccatttgggaagccccatcctagttatgacaggaattcaaccccaattctactatactcaggttcacagcaaattcacacacattaaaatttgagaaccactaatacaggccatttcttatagtactttctgtgcttcactgtaagaaatggacagtattttccatttattacatcaacactactagcctcccagtttagttaagaggtaatctacaatcgagtgaggatcaaaggcatgagggtaagacttggaaactgcaaactggcagcccatgaatcagatggttcctgtttagcccacactgtatcaacccatcttaagattaaaaaacttttttttataagttgccaatatttaacaatggcattttacacaaaaatctagattcacagctttgcttggaagaaaaacaacaacaacaacacagaccttgtagcactgggttggccacacacataactgtctttttagataggacacgtgcagttggggtgccacaatccctactcactcctactgtcccaaggtcactccaaccttgaggcacagtctctgctgctattatcatcacacttgcactggttttcttataatagtagtgaaaaaaagaaagttttttcttttttttttttttttctgcacctgtgtttgtcaaaaggaactacagggctacaggtttcaaaagcacatggctttgtggagatgaagaataacaagctagcagtgtatctgtggtgaaagactaccacctacaatgaccttacaatggccctgattaagctgacctcccagccatgtaggcattgcagtttgtggcccgtggatggtcttctttggactgagtgattccagtccagcctcccctatagtggacagagtcactttgctcttactacacttcagacatggggcagacagccccactagtgggtctatttgatgattctctatgtgaaagaaacacagaagtgctgactttgttccagcttattctggctccttgtaatgtggtgagtcaagagcttctggtcattaacaaggctgcttccccaatgagttgtgtgcacagaagagaaagactgcctttgaaaacaacggcaaacatcttgtaagcgagtgcctgtggatttgggagctgctgcttagagtgtcatgtggagaaggattcagtggctactcaaggatgccattttcaactatcaacattcccagtggctactaaaaggggaaagtggcaagacgaactctaggtctctttcaccctgaaccccaacatcaatgctgtcctgacagttaaatgagaaggaagccacttgcaaaatcacacctaagttactgctgccaatttttctgtggtccagtgatactttcccagtgcagaacaaagcttaaaaaaaggagacaacacgggctgggcacgggggctcacgcctgtaatctcagcactttgggaggccgaggcaggtacatcacctgaggtcaggagttcgagaccagcctggccaacatggtgaaaccccatctctattaaaaatgcaaaaaattaactgggcatggtggtacgtgcctttaatcccagctatttgggaggctgaggcaggaaaatcgcttgaacccgggaggcggaggctgcagtgagccgagattgcaccactgcactccagcctgggtggcagagtgagactccgtctcagagaaaaaaaaaaaaaagaaaaaaaaaaaaaggaagcaacacaaagggacatgttcaggtagccagctccttctttctccaggctcagcagactacaggactggtaggattgaaagcataattacctaagaaaaatgctacagtctcagaaaaggatgacaggaacatactgggagccacttctcctaggaccctgcccagctgctgatccagggtttccccttgaagacgttcatctctcttaaaaaaaaaaaaaaaaattatgcgacattaaaatttctcaataacaacgccatttcttgctgccttgtgttaactcaagggtaaaaataaatgattagtagacgattagcagtgtcttctaagcatataaacttcggtgggggactccaatgttctcagagtatttctgcactacagagctaggtaccaagtgagaaactaaagggaaagctgagccagccacattatcaggaaaacactcggaacacaggcggcaggggactggaccagtgaacatcactctcacgtgcactgagtctccgcccacgtcgggtctacaggacgactgagaccaccttctacagcagcgggacacgtgttgaccttttgcctttttagtggcacctttgggcaaaatgaatctaacattctatactatgctgaacatcattttaacagcagtcgtacccaaaatcttttccaaaagtgtgttagcccttcttgtacacatgatactatttaaaatgaaaagatactattaaaagacactatttaaagatacaatttaaaacacaattcttactttatatctactatttcaacaaccaaaaagaggggtgaaattcttggtcctaagatgtccacagcaagtcaagacgaccgatgagccacacagggaaaggaaacaaaacaccctcacaggtcacactcacgaatgcggagcccaggagccattcacagtccctgaaacttgaacagatgctgagccctgtgagaatatggaagtatacctggtaggcctgcaccagaatgaagatgttgtccactccaacagccagcaccaggaacgggatgacttcaatcacaatgagggtcaagggcaacccaatgtagctgaagacacccaaggagcaagccaccgagctcagcacgatcaagatgcccgcgatgcctagtgagaccttcgaatccacctgagagaggcgacagacacaatcaccaattagttacagggttgtctgtcccacttgttactaaaaggtcctcctttttactttacagggctgtattaaacctagagttgaatgtacaattctgtgtttcagagaggacttgtaaacatttctaggtctgctcgggcaacacatgttatgagtttgcattcttaggtgatggactggacaaataagaaaaaactggattatgtgaaataaactttaagataaaccaaaaagttggaatgaagaaaatagatgtaggcaacagaaacgttacatacaattaaaacatgggggaatttatggcagttttaaacataatggaataagaataaagaggcaaaaatatgacgttacactgtgcactgctgttaacctctagaacatacaccaccccccccccggcttaccagaagcctgcgacagcttttgatgtgccccaaggctagggaaatatatagaaacatgatggcatagctaattacaacggtgaagacatcactgtcactttcacgatttagttcatcttcaatacttcgttcagcagtgaaggaaatggtcagattgggattcttgtagtttttcacaaaattaataaacctaaaaggtaagcaaaatgttatatttttagttaaactaactgacagctaagtaagaaacttctccctaactttcacgatacaaaggccacgttttcttttttttggttttgagactgattctcgctctgtcgcccaggctgaagtgcaatggcgcaatctcagctcactccaagctccacctcccgggtttgagtgcttctcctgccccagcctcctgagtagctgggactccaggcgtgcgccaccaggcccggctaattttggtatttttagtagagacagggtttcaccatgttggccaggctagtctcaaactcctgacctcaagtgatccacctgcctcagcctccccaaagcgctgggattacaggcgtgagccactgtgcccggctcaaaggccatgttttcttaacctttatcctgcattaggatcctttgtttgcttttgttcctgttttgaaatagagtctctctctgttgcctcggctggagtacagtggcactattacagctcactgcagcctcgaactcctcagcttaagggatcctcctgccttagcctcttgagtagctggtactacagagacgtatccccatgcctggctaattttaaaaattttttgtagagatggggtctttgccatgttgtgcaagctggtctcaaactcctggcctcaaggcattcctcctgcctccacatccctaagtgctgggatgacaggcaccatgcccagccactgcattagggtcttccacactggagactatcagattacagctaaggttccatacatgctgaattaaagtaagtttagggctgggctcagtggcttatgcctgtaattccagcactttgggaggctgaggctggcagatcacctgaggtcaagagttcgagactagcctggccaacatggtgaaagcccgtctctactaaaaatacaaaaattagccaggcgtggtggcaggtgcctgtaatcccagctacttgggaggctgaggcacgagaatcacttgaacctggaaggcagaggctgcagcgagctgagatcatgccactgcactccagcctggatgacacagcaagactctgtctcaaaaaaaaaaaaaaaaaaaaaaaaaaaagaaatgcattcagtctactaaatcaaaaccacaatgagataccacttcacacccatgaagatagctagaatcacaaagtcagataataaaaagtgctgacgaggatgcgaacgaattggaagtttcatggactgctggtggtgacgtaaagcgctatagccactttggaaaacagtctggcagttcttcaaactattcaaggtggacttaccctatgactcagcaattctactactaggtatgtacccaaaagaaatgaaaactcacatccacaagaacttgtactcaagtgttcatagcagcattattcataatagccaaaatggaaacagcccaagtgtttgtcagttgataaatgcacacaatgtggtatatccatacaatggaatgaaaaggaatggagtactgatacatgccacaacatgaatgaaccttgagaatattatgttcaatgatagccagacaaaaaagtccacatattattctatgcacataaaagtccagaataggaaaatctccagagacagtattttagtggttgcctagggctgtggataggaggatgaaaagatggagggtgttagttaaagggtacagagttttattgtggagtaatgaaaatgttcctaaaattgactgtggtgatggctgcacatacacgtgaatatagtaaagctactgaattgtacgcttttttttctttttaaattttcttttttcttttttttagagacatgcaaacattgcctaggctggtcttgaactcccggcctcaagtgagcctctcgtctgggcctcccaaagtgctgggactacaagtgtgaaccaccattcccagcctgaactgtatactttaagtgggtgaactgcatgatacatataccatatctcagtaaaacaattttttaaaagtactggagggcataaagtgcaacctggcctcctaagtcctctcttcccattctctagaggtcacaaacacagttaatttctgaggtcatttgcttgatatttttttctaagcatggacagcagcataaacaatatatatttatacaaatatacatcatggaccatttacttcactgtcttttatgacagcacaatattctattgtattcattccttattaaatacattcagcatgctcccaagttttgctgttagaaaacaatgcaggtggctgggtgcagtggctcacacctgtaatcccggcactttgggaggccgaggagggtgaatcacctgaggttagtaggtcaagaccagcctgggcaccatggcaaaaccctgtttctacaaacaaatacaaaaattagctgggtgtgatggcatgcacgtgtagtctcagctactcaggaggctgaggtgggaggatcacttgagcctaggaggttgaggctgcagtgagctgagattcagtcactgcaccccagcctgggcaaaagtgaacccagtctcaaaaaataaatgaaataagtaaaaacaatgcaaggaacctttttttgcacacttttgcattcctgtggagggagagctgtttaaagcacctgctcaaaggtaaatgtgtttacagtttcttcttagcatcattagtaccaagtgaacaaaactacgtaactcagatctgccattggttaatttagaaaatgaagtttaagtgcttgccgcaagtgtctagcttcccacaatgcaaggacagtctgctcacacccatgagtgactcactctttttcccaggcctgggccctctggagcttctctgtatcattatagtaattattgacagggaaggtaatcacaagggcagtggcgttattgtagttttgatctagaaaggaaaaatgtgacatcaaaaagcagattacaagcatgcagaaaattagacacataccaggggaaaaatcacaacacagatttctcactggagctatggactgtatctctgggctctaagaattaaacaagagtttgctgaaatagtctttatgtacttcagttaatgaataaaaaggattttttatctgaggtaggcatggttatcattcaggaagagtaactctttttttttttttttttaaaggatacagtacatgcatgttaacaatttcaaacagaacagaaaagtgtttatcgaaaattctctccttctccaacatctgtttcattgtcttagttctcctccccatactgtgaccatctgcgaatctttccagagccactccacacacacacaagcaaacacacagattcttcccctttccctcttaaccacacaaacagtaaaatactattctgcacattacattttaaaattttgtatcttggagactgctccataaagagtttccttattcttttcctacagtattttctggtatactttagccaatcccccccaactgatgagtagttttgcaattttttctattacaaagttactataaatagcctataaatattttaatgtgtaaaacacatacttgtagaaataaatcttttttctttttttggggtgggggcctgacagggggacagtgtcttgttctgttgcccaggctgaagtacagtggtgcaatcgcggctttttgtggccttgaccacccgaactcaattaatcctcctgcctcagcctcccagtagctgggactaaaggtgtgcaccaccattgctggctaatttttgtatttatgtagagatgggattttgtcatgttgcccaggctggacttgaactactgggctcaagcaatcctcctgctttgccctcccaaagtgctgggattataggcatgagccactgcacctggctagaatcaattcttaaagcataatcaatgaatcaaaaactatgtatatttccaattttgataaattctcccaaactgccttccaaagaagcttaactatttttcattcctttttttcttcttttttagagacaggatctcactctgttgccctggctggagtgcagtggcacaatcatggtttactgaagccttgacttctcaggctcaagcaatcctcctgccttggcctcccttttcattactttagtcaagaaaatatttactgaggctgggcgtggtggctcatgcctatgatcccagcactttgggaggccaaggtgggtggatcaccttaggtcaggagttcaagaccagtctgggcaacaaggcaaaaccgtgtctctactaaaaatacaagaaattagctgggcctggtgatacatgcctgtaatcccagctactcaggaggtggaggcagaagaattgctcgaacctgggaggcaggggttgcagtgagccgagatcacaccaccgcactccagcctggacaacagagcaagactctgtctctgaaaaataaaataaaaaccttttttttttgtatttcttcttttgttatctttcacatgacctcacccacttttctttcaggttgttgatctttttttcacaactttttttttttttttttaagacggagtcttgctcttgtcgcccaggctggagtgcaatggaatgatcttggctcactgcaaactccacctccaggattcaagtgattctcctgcctcagtctcccgagtagctgggactacaggcacacaccaccacgtgtggctaattttttttgtattttcagtagagacagggtttcacattttggccaggctgagatgagatctttatttattaagaaaatgctgactgccatgcatactaatatttttgtccagtttttttttttttctggcaaggtctcgctctgtcacccaggctggaatgtggtgcaatctcgcttactgcagcctcaacctcctgggctcaagtgatcctcccacctcagcctcccgagtagctgggactacaagcatgcaccaccatgcccagctaatttttgtattttttgcagagacggggtttctccatgttgctcaggctggtctcaaactcctagctcaagtgatgtgctcgcctctgcctcccaaattgctgggattacaggcatgaataactctcggcccagttttgtttttttaactgtatgtttgttctccacaaatgaacatgtactcaacttcatcagtctttccttttcgggcttctgagttttgtgtcttgcttagaaatatcttttccacttaaaaattatttttaaaaatgcctcctgaattttcttccagttcttacatttcttttttttttttgagatggagtctcactctgtcgcccaggctggagtgcagtgacttgatcttggctcactgcaagctctgcctcccgggttcacaccactctcctgcctcagcctcccgagtagctgggaccacaggcacctgccaccacacccagctaattttttaaagaatatttttagtagagatagggtttcactgtgttagccaggatggtctcgatctcctgaccttgtgatccacccgcctcggcctccgaaagtgctgggattacaggcgtgagccaccacgcctggcccagttcttacatttcaatcttttatccatctggaatttattttggtgaaatgaacaagtcagagatcaaagtcaattgtttcccctatggctagtcagttgctgacaccatcccttctccaacaattagaaatggcattttcctctctgatgcacagtaaattttaaatacagattgcaacttctcccctgccaccaagtgaggagaagaaaacctatctggattcttaactggttgggcaaaacctgttgagcctgtaatttggcttaagatgccaaaggtgtcacatgaataatcacctcattttgtcaagtacaattggttctaaagtgctacaggaaccaggaaagagcaaaccagctgctcttcacactgtaagagtgtccaaatactcaactgactggcttagaagaaaaaaaatccatcaactttgtttctttttccacatacctcacatactatcttttctctatcacagaggctcttacctgaggtccatgagctccctagagggtctataaatgaacttcggaggcccatgaccttcaagctgaacaacaatgcagaggtttgcaattgcattattctggggaaaggtacttagccttcgacagcttctcaaaggcatgtgtgacctaaaaatggctaacccaatccacttcttttaaatctggaatgaaacccaaacccaaagccaaaggagatactattctgggattcaagaggtaagaaattaacaaaactgcccaatttatgaaatcttcataattaccacttgatgctaatgacaaaaccgagatgactttatctaaaaggaaaagtcaaagcttctcttacttaccatcatagcctcccaacacaagccacgggaacactggtccaccaaacgtacccagacaagggtcatggagcaaacttgtatcattcagagaggcaggagccctgccaaaaagtttagaaaacacctcccagttagaagggcctcaagacatcagggacctaaacatttacacagtgaacatttgatgaggctggctgtattctaaggacaacatgggccctgaggtttctcagttgagtaatacagctcagcactcacctttgggagctcagaatcactgggcaagaggcaggcaaatacagcccagtgccatcaatggcacatggtgcatggcgctacgcaggcacagaggagggagcaaacactaaaaggcaaaattatagccaagaggaagagactgtacagacccagagctccgaggatgagggggatttcaccaaagagggaggacaaaagggtgtctcacacaattacaactgtgggaggaaaaagggagggagagagaacagtgagagggaatgagagcaagatggtggtttggcaagtcctgtatgccgggtatggtggcacgcctaatctcaagtactcaggaagctgaggcagaaggatggctataacccaggagtttgagtccagcctggacaacatagcaagatcccatctctaaaaaaaaaataataataattcaaagaaaagatgtcctgtcctagagcatggggtgcccaccaagggggctcctgaaggagggggccagtctgggaagagtaatggacagacaaatgcaaaataaaaggactcagtgccagttaagtagtttggatttttattctggaggcactggggaacaattagagatttccgggaaagaaatgtcatgagctgttttacaaagatagcttgcgtggcaaagtggaaggtctggaaacggcaaagaaacaggaagcaggtggaacagtaagtggagatgttagcgcaatggcccaggcaagaggcaactggcagtgcagtgcagacagacagttggccagtggagagtgaaccagcattttcggacagaccatcagctacaacttggccaggtgctgagaagcttctgcatatgacccacccgtcagagtggatgggtgacggcatgagggaggtcaggtgacctgcagcgagcagctgagtcccttcatccacagcagaaatctgagagagcatccagaggctcagacccgtaagaaccccatgaggaaggcgagggcgaggcagaattcagggataaagcctcaagcctgagtaactggtagctgtcactgcctttaaacaaaatggggagaagaagcaggtaagggcatggttctgggcaggccacctgccattactgcaggaccctcaggtgaaaaagtccaggaaaagctggagggagaggaaaggggacagcgctagggcgagactggggttatgaggacgcgcacaagcataactacaaaccaattcaggtccctgccaccaggagcctgccactccctgtaccgcttccacactggtgggaaccacgtccgctttgaggaaacacaaggctcacgcacctctgtcccccatcatttttgttgacttttatcttgtgccacagagagtaaactataaaatttatgtaacattaaatggttgtccaattataaaaattatgtaacattaaatgttttttgtttcttcaaattacccatggctcgtctgcaccgtctaccctgtggagaatgccggtttagggtatggagcataagctattgtgttttcatgagtataactcatgtttttaggggtgatattcttgaaacagagtaaatatagcccaactgcataaaaagtcttactccagtaacaaacaaacagaactcaaggtcaaagttctttagaaccagaagtgagagtccttagctcttgagaagtagtcggctgagcagtgtccttaaaggcaaaaaggaataatttctctgttcccatgctgaagaaatagccactgtggttgctcaactggctgaacaaatgtccctaggccaggtccctagcattcagggagagtaggcccatccggcatcatgctactcttcccctactgggagaagccttaagattcccctacaggtcaccaaagcaccgcttcctggggtgactattcccaattataaacgcaccctgcccagctagacatgcctcctaagggaagcagctgcagggccctccaatctaaagctgcggagctgcagacctatactgcctcaactcctcagagggaggctgcctcccaaatagctggggcactacaggggactgggctatatatctgagacagaacaaaaggcaccaaaggctcttctatctttaaatcttgtggggggtgtgatacatgacactgtgttagcgacccaggcacgaggtaaagggtgagaggcagctgcactcctcaatcacacaccacgagagcttcctgccagggctctgcacttgctgctggttctgccgggaactctcatccctgtgatgtgcccagctgtcctttcctctccctttgtgcacatctccacgcttaagcaatgcaccccccactctgtccagccttatttttctcctcatagcactaatctctagctggcacgatagcacatgttatgtgttcatcaaccgtctccctccattaagatgtaagcttccagctgggcatggaagctcacgcctgtaatcccagcactttgggaggccgaggtgggcggatcgcctgaggtcaggagattgagaccagcctggccaacatggcgaaaccccatctctactgaaaatacaaaaattagctgggcgtggtggcacacacctgtagtcctagctactcaggaggctgaggtatgagaatcgcttgaacttgggagccggaggttacagtgagccaagattgcgccactgcactccagcctgggcgacagagcgagaccctgtctcaaaaaaaaaaaaaaagatgatgtaaacttcacagggcaaggtcttgttgtttgctcacctctgggttatgctcataaaacaagcttttgcccatgtaccctaagtcagacccaagaatggtgtctaccaatgattgtctcttgccacttaccgtacgcagtacagaaagtgcgtgtggtaatcggcatacacaaagaagtcgtcccctttcttgtggtccagcacggaatggctgttctggaagtaatttaacacactcaaaatggtgcagttcgtgttatacggtgaaagaggggccaagcagatgtcttgaagtgtcacagtctcattgtcataagaggcagtaatgttttcgatggctatttgtaagtcaagaacctgaaagaagattttaaaaataagcaaacccagaaacacgtcacatttctctcagatcttgattaatcagcattgccctgagggtcagaagacaaagagtatttggggaaaatacttcctaagatgagggagagaattaagatgcaatacagtaagaaaactggtcaggccacaggcccactctaacagcaaactagttagaggcgtccacagaggcggcgaggggtagggggaacaccatgaccagaacagctatcaacataggacacacaaccatctcccctccaccgttctccagtggtggccagcaggccagaggggagagtggagggggactcctggtctccctgaccctcctctcaatagtaacacataacctcctgccttgctctgcactacagccatttatatatgtccccttatttcctaacagagaagatgatcttggaggtaaatgactatgctgttcaccttcagcaacaagctggaaaaagcaacagacagtcactgggtagagaaaagattcaagtcttgggaccattttaatgcttttcaagattgcagactttcttgtagacatgagcaatgtttaaaggaaaaaccatgtgattatacattcattaaaaaagaagccggtacagtttatgcacaggtacagttctccaaggcaagtgtgacagggacaatgggaaggtttacatgcctttctaggagcaatgggatggatcttgccccaaatgcgcctctcaccaaaaacaggctgggtgcccatgttcaggcagtgagtgataagttcattcctacaggttggatcagggatggtaatctggcagctccttcctcagcccccaggacagcagtaagggcttcatgcctctgggtccttgcatattactttcagttaccaacagaaaacatttcacaaattcctaaggtgacttcctaataaatatatcctgcctcaatagagaaacgccactgaagtcttctttctctgctcatctcaatttcaagaaaaaggcaaggtctactatctgaagtaaatacaaaagtgagcaacaataaatattccattaagttcaacatcattcactttcttgaaacctaacttaaaggcagctttgccattatacgctaagattttcaagatataccatgacattcagccccaaatccccatctagcagtagtcaacatgtaaaagccagcaaaccacaaggtcatctagagtgacttatttcttcaaacagcaggttacctggtgcagtatctgtatgtcaagcggaggtccaaagggtacatcagctcccgaagggtatggctggtaaatgtgtttgtcagtgagaggggcccggatgatgagctgctccgtccggaagaaaggcccaaagtgctggtcaaagtactctttttccaggcgagcctggctgctgggggctgaccagaggtcaactggattggttgtgacccggacaaacaccaggcctgacgaacacgcagtaatgaagaccagcgagaagaaaatgacacagccagggtttcggacgcagaaagacccccagcgtgtgaacagccgcctcaagcagccctcaaatgctgcgctgacagggtcacagcaggacgcctctcctggaagaacgggagaggaagggaaggtggaggttaagagccaagccgttcctgaaagtcggaacagggaaagcattagttgctatctcatggcaggaatcaagcccacctggggacacatatgagacccctgccctcagctacctatctgctcagcaaagccacctttgttggctgccctcaatgagcgctattcccaccccacagaggagatgccgacacaggagcctctgaagggtgaggttcaaccctgccctgctattcccactcttgtcctgctgctttcgcgcctccccagctatgattaattacttggttctgctgtgccaccctgactagatggtagggccacaaaggcaaggaccatgtctgccttggtcgcagccgtgtcctcggcactggcacaccacctcacccactgctgcaaccccactgaggaaacgaatgctctcatgacagacagcatcatctgaacccttttattcatggacaaatatgcctacctttgtcacttgcattaacagaaaaagctatattgctatcgatgggagtgtactcggagacaaaataccgttttctgaaaaacagaagtgaagaaatagcattagtggacttcatcacagtgaggttgtttttgggacattcctgtaatcccatgaaatgctttcttcctcctcctggcctcctcctccctaattactgccttctttcccctaagtccccttgctctgggtccctctgctcaccagtctcaggagaaaatttaagaagatgttaagagaacaattaataaaggataatttcaccttgtggccctcattttatttaaaacttttaggtcctttaaaaacacactactgggctgggcgcggtggctcacgcctgtaaacccagcactttgggaggccaaggtgggcgggatcacgaggtcaagagatcgagaccaacctggccaacatggtgaaaccctgtctctactaaaaatacaaaaaggttagctgggtgtggtggcacgtgccttgggaggctgaggcaggagaactgcttgaaccagggaggcggtggttgcagtgagctgagatcgcgccactgcattccagcctggtgacagagcaagactccatctcaaaaaaacaaacaaacaaacaaaaacatgctactctttccagcagcaatgagcatacctagtgcccagatcttcgtttctacataccattctccaataaaaggaaccagagctccttgcagggcagggacagggaatatgtaagataaagctggggatgggaggtgtatgtaagaacacagaagccagccagaaggcactcccaatggcccaaagtggaaaactttgagtaacaagataaatgacagtgttggatacaacccacagaattaaaagtccatgatgtaaataactgagtaaataaatgagggagaagggatagctttctgtacagaagtccagttagtaaatgcagaggaagagagggaaagagaaaaaaatcactatcaggcaaacaccttagttataactgttgcagacaagacccaacaatgaatgctaaaatcagtggttgagtttcaggaggaacaaaatattagtatagtctcaaagcatcttcccccaagatatttatcaattacgaagggaaaagcagtaacttcacagtggagatagccagcagacatcaccttgagcaagtgatcaaggttaacatcaccaggaaagagacgcatcaacatcagggatccctgacatgatgcaccgagaaagacataacatgacttctgtgatgtacttgtcaaaacaccttatttcaatctcatcatgagaaaataccagataaagccaaatggaaggacatgctacaaaatacctgaccagtatcatcaagagtgttaaggccagaaaaggaaagactgaggaactttctgtcacagattagaggggactcataaaacacaaaaatgtaatatgggaccttgaaacagggaagggcattagagaaaaagctggtgaaatctgattaagatctctggtttagctaataataatgtaataataatggcatggtcgtggttttgatcattgtactatgagttttttttttaattattattatactttaagttttagggtgcatgtgcacaacgtgcaggtttgttacgtatgtgtacgtgtgccatgttgatgtgttgtacccattaactcgtcatttagcattaggtatatctcctaatgctatccctcccccaggcccccaccccacaacagtccccggtgcgtgacgttccccttcctgtgtccatgtgttctcattgttcaattcccacctatgagtgagaacatgcggtgtttggttttttgtccttgcgatattttgctgagaatgatggtttccagtttcatccaagtccctacaaaggacatgaactcatcattttttatggctgcagagtattccatggtgtgtatgtgccacattttcttaatccagtctatcgttgttggacatttaggttggttccaagtctttgctattgtgaatagtgccgctataaacatacgtgtgcatgtgtctttatagcagcatgatttataatcctttgggtatatacccagtaatgggatggctgggtcaaatggtatttctagttctagatgtactatgagttatgtaagttgtatcatcggggaaactgggttaaggatacacataaattctaccattttgcaactttttggttaagtctacaattatttcaaaataaaaagtaaaaaaagtactgtcctaaattaagatgcaaatatctaaaaggactatagtactccatttaattagatttgaatctgatttcgctcatttgactctgacttttttttttttttttttttttttggtgagacacagtctcgcactgtcgccagggctgtttgcaatggactcctgacctcatgattctcctgccttggcctcctaaagtgctgggattacaggtgtgagccactgagcctggccttgactctgactttctaaagaatgagtggccggctgggcacggtggcttactcctgtaatcccagcactctgggaggccaaggcgggcagatcacctgaggtcaggagttggagatcagcctggccaacacggtgaaaccccgtctctactaaaaatacaaaaattagtcaggcatgcaggcatggtggcggatgcctgtaatcccagctactcaggaggctgatgcaggggaattgcttaaacctgggaggtggaggttgcagtgagctgagatcacaccactgcacttcagcctgggcgacaagagtgagactcagtctccaaaaaaaaaaagaatcagtggctaatgcacagtgctttaaatcacacatcattttgaataaatcagtaaaattcatttcagatgttgcagtgttaaacagaactttgatggtttactatagaatagctgtaggacacaataatccatgcaatggtattcatggaggtatttgtttcttgtcctaagtaaccaagctctgacaaatgaaagctcaaagtgccagtgggcaattttgctctttttgccctggatgacaaacaaaactgcttacctgtagcaccacactgcaaaaaatgctccaaaaaacacaagcaaaaacgccatgtaggtgatccacatgatgacatacatggcgtccaagccaaggatcgtccagggagcaggaggaggtgggggctggggcttggggccacagacaatagagcagtcttggcagctacatggtgctgtgacctcatccacagactcgtcacagcctttggtggcattgttcatgggctccatcccatggactggaaaatctacagaaaggaattgtgttgagtacaaatctcaattaaaaacatccaaaattttgtattatacttaaactcaaagaaaagcccactgaaatacataaaacaactgaaagaagaaaaagaattggaggttttagtttaattaaattatgttttgctgcttcgtcctatggaattttaagttacctcaataaacttgcgcgtaggggtttgtcactgatagaggaatcctccaagtacaccacataccaaggcaacccttcaatcatgtcccatctccattctcaggagctaatactatagcagagctctagaaaagctgcctcccaccccctttttaactgcttattctttcaattatgacagcaatgcctgaaggcaattcatttcctcctccattcccactcccagcaccccctaaattagccacagcaggataaatgtaccagttacctctcttactgggagaaactatgaactagttacctgaatgtgtttatcttcctattgtagattatgcttcctcaactaagattcattcattcattcatggagagacagggctttgccctcaccaaggttggagtacaatgggatgatcgtaactcactgcagccttgaactcctggacccacgcaatcctcctgcctcagcctcccaagtagctgggactacagatgcatgccaccacacctggctaatgtttaattctttcatagagatggggcctcactacattgcccaggctggtctggaactcctggtcttaagcaattctcttgcctcagtctccccaagcactggtgagccactgtgcccagccagttccttggctttaaaacaatatcataaacacaccaaacttggaatctttatacctacctgaaaacacaggagtgatggtaaaaggtgcctgtccattgtccttattgaacatgtattcaatccagttggtggcattacaggcgtcagcgtccttcccacacaggagtcccagggccttgtcattacttgagggggcctccacatcccggcaggcattgtacattgctagaagaggaaacccaaaggaaaaaggagacaagatgcttgctgtaattcacgaggcaagatcttacaaaaggcctcttgaagggaaacacgaactccatatgcaccatgctggaatgctggacagcaaacactaactaagggcacgaacagagattccctttaaattggcttatcaccctgcaaataatatggaggcccgattccaagtaacttaaaagtaaaaaacagacaggaaagggaaaggcacacgttatctcatagctctcacaacagcttggagaagtcaaatccccactatatagaagagtataccaaggcccaggaagacgcagctaagagcctcagtacttcttcagttaacaaagctggttccagaaaacctctgccgcaggaagctacacagccagagaattatggaacttacttggaaaactggttttagagcagaggtcacgtgtcaataaacctaatactgttggccgggcacggtggctcacacctgtaattccagcactctgggaggccgaggtgggcggaccaccaggtcaggagatggagaccaacctggctaacacagtgaaaccccatctctactgaaaatacaaaaaattagccgggcgtggtggcggacgcctgtagtcccagctactcgggaggctgaggcgggagaatggcatgaacccgggaggcagagcttgaagtgagccaagattgcgccactgcactccagcgtgggtgacagagcaagactccatcacaaaaaaacaaaaaaaaaaaacaaaaaaaacccctaatactgttatctttttggattttattttcttacacatacacacaacacattacataaggatagtatcagtgtattacacctaagaaaatagctggaatgggtcctgtactgtcgattctcatttaccagtctctgcttgctagaaacttcccaggatcttctttccctaatcttcaaggagatgcttacacattcattttgttttacccttgttctggaaagacaggttaactagggtgacagtcatctccctcagaattctcaacagattattccattgccttccaggctctatcatggctggtaagaaaatctccaattatcattgtcttaaggtgatttgtgtcttgtctctatttgcttttaagatatttgtctttgggccaggggtggttatgcacacctttaatcccagtaatttgggaggccctggtgggtggactgcctgagctcaggaggtccagaccagcctgggcaatatggcaaaaccccgtctctacaaaaaataaaaaaataaaaaaaaattagccaggtgtggtggcgctatataatttacaatataattacatgtaatttacaatttacccccttaaactatataatttaatggagtttagcatattcatagatatatgcaactatcaccatagtcaattttataacattttcatcacctcaaaagaaatcctgtattctagctatgctcaactacctccctacttccctaagccctaagcaaccactgaactgtctctatttatctgactatttcagacagttcacataaatccaatcatataatatgtggtctttcatgaccggcttctttcatttagcataatgttctcaaggttcatgcatattgtggcatgtatcaatacttcatttctttttatggccgaacaacatttcattgcaaggacatatgttttgtttatccatatatcaggtgataaatatctgagttgtttccacagtttggctattatcagtaatgctgctagaagcatttgtgtataagtttttgtgttgacctatactttcgtcttgtgagtggaactgatgggtcatatggtagttctatgtttgtttcaggaactgccaaactgttttccaaagtggggtctcactctgtcacacagattggagtgcagtggtgtgatctcagctcactggcaacctctgcccctcaggctcaagtgatcctcccacttcagcctctcaagtagctgggactacagatgtgcaccaccatacccagctaagtttttgtagagatggagtttcaccatgctgcccaggctggtctcaaactcctgagctaaggtgatccacctgccttggccgtccgaagtgctggattataggcatgagccactgtgcccagctgtttttggtttttggatttctttttaataaaggttcctattttccacagccttgtcaacactgcttgttatgtgactttgattctagccatcctggtgggtgtgaagtggtatctcattgtggttttgatttgtatttccctgatgactcatagtattgagcatctctcatgtgcttgttggtcatttgtatatcttccttagagaaatgtctactctattcagatcttttgccattttaaattgggttatttatttatcattgagtagtaagagttttttttttttttttttttttggagatggagtctctgtccctcaggctggagtccaatggtgtgatctcagctcactgcaacctccacttcccaggctgaagcaattctcctgcctcagcctcctgagtagctgggattacaggcgcacatcaccacacctggctaatttttctattttagtagagacagggtttcaccatgttggccaggctggtctcgaactcctgacctcaggtgatccacccgccttggccccccaaagtgctgggattacaggcatgagccacagcgcccggccaagagttctttatgtattctagatacaagtcccttatcaaatatacaatttgcaaatatattcttgtccttttttttgagacagagtctcactctgtcacccaggctggagtgcgaggtacttagtgcagcctccttaggctcaagcaatcttcctgcctcagataaccatgtggctgggaccacaggtacatgccaccatgcctggctaattattttttgtagacacagggtctcactttgtcacccaggctggtcttgaactcccgggctcaagcaatcctcctgcctcagccacccgaactgctgggataacaggtgtgagtcactgtgcccggccttcttgtcttttcttgatggcgtcctctgaaatacaaacttttttattttaatgaagtccaattaatcttttcttctgttattgctcttgtttttggtgtcatatttaagaatcaagtgccaaatatgaggccatgcaaattaatccctatgttttattgttttatagtttttagctcttacatttaggtcttcgatccactttgagttaatttctttaacatatggtgtgaagtagggcccaatttcattattatttatttatttttgcatgtgtgtatccagttattgcagcaccatttgatgaagagtattcttttctcattgaatggccctggcacccttgtcaaaaatcagttgaccatagatatattatttattctcagttatattccattgatctatatgtctatctttattccagtaccactgtcttgatttccattgcttagttttgaaactgagaagtgtgagtcttcctattttgttcttttttcagggttgttttactattctaagtccctcaaacttctatgtgaatttcagaatcagcttgtcaatttccacaaagaagtcagttgggattataacagagattgccctgaatctataaaacaatttggagaatactgatatctaaacaatattaagtcttttgattgataaacatggaatgtctttccatttatttagatcctcgttaatttcgctgaataatgttctttagtgtgttttttctgtttttctttttttgagatggagtctcgctctgtcagccaggctggagtgcagtggcacaatttcagctcctgcaaccaccgcgtcccaggttcaagtgattctcatgcctcagcctcccaagtagctggcattacaagcgagcgccaccacgcccagctaatttttatatttttagtagagatggggtttcaccatgttggccaggatgatctcaatctcttgaccttgtgatctgcctgcctcggccttccaaagtgcttggattacaggtgtgagccactgcacccggctgttctttaaagtgttttgccttctgttatagttactcctaagtatttcccatactaaagtaaatggaattgttttattttcactttgagattgtccattgcaagtgtacagaaatacaactgatttttgtatgctgaattttctctaagttctcagggttcatcccttatccactctggaaaatcctcattatccctttgattattattgtctctccccaactctctggagcttctcatgttatatgtcatttctttaatgatttataggtctttgtatctgtatgctgttttctgagtaattccctcgtatcttccagctcaccatttggttttcaggttttattttatgtttcaagcatacaaaacacatggagaataatacaattctcatttcctcattacccagttaactatcagtcataccatttcacaacatttgcctcaacattaaaaaaataatggactcggccaggtgcagtgactcacacctgtaatcccagcactgtgggaagatctcctgaggccaggagtttgaggccagcctgggcaaaaaagcaagaccctatctctacaaaaaaaaatttgtttttaattagctaggtgtggtagcatatgcctgtggttccaactacccagggggactacttgaacctaggaggttgaggctgcagtgagccatgattgcatcactgtattccagcctgggtgacagcatgagaccttgactctgttttgtagtactgcactattcagaacaactggctatggcataatttaaaaactaaataaaaataataatgcactataggccaggtgtggtggctcacacctacagtcccaacactttggcaggccgaggcaggaggatcacttaaggccaggagttcaagaccagcctcaccaacacagtgaggcccgtctcttccaaaaaataaaaaaatacttacacacacacacacactctatagattcagttgaagctccccaattacccctccctgacagtagccccttccctaaggtaaacacaatcctgaatttgatgtttatccttcccatgcatgtttgtgtacttgttttaagtatgtagtacttttgtttcaaaatgtcatataaacatgtaaccaccattatagtatcatatagagtattttcaccacctaaaaatcttctgtgctctacttatgccttcctctctcctaacccatggcaatcactgactttttactgtctccacggttttgccttttgtagaacgtcatatagtggaatcatagtgagtagtcttttcagattggctttgcttagtaataggatttaaggttcatccatgtactttcatggcttgatagcactgaattttcatggctttttagcaccaaataatattccactgtgtggatgtagcagtttatttacccattcacctactgagagaaatcttggtggcttacaagttttggcacttatggacaaagctgctacaaatatccacgtgcaggttttggggtagacacatttttaactcatttgggtaaataccaaggagtatgattagttttgtaagaaaccgctaaattatcttccaaggtggctgtaccgttttgtactcccaccatcaatgaatgagagctcattgccagcatttggtgttgaaagcgtcttgaatttttgccattctaatagatgtgtagtggtatctcgttgttttaatttgtaattctctaatgacataatgttgagcatctcttctcatgtacttatttaccactgtatgccttctttggtgaggtatctgttcaggttgttttgtccatttttcaattgggctgtttgctttcttattgagttttaggagttatttgtatattttgaataacagtccttactaatatgtcttttgcaaatactttctcccagtctgtgtcttgtcttctcgttcttgaggtcttcaatttttcacaatcacaatagtgttacagtgggtgttcttatatgggtctccaggtttatatgcatttagagtttctctaaggcaggcatctataagtgaaatttctgggaggagggttagcttcaacttactacgtactgcaaagttgtttttcaagtagttttgaaacgattgtaccaaattatggttgtaagtggtggagtacattagtattcctattgcttcacattttcacccacagttgaaattgaccaactttttaatttgtgccaagctgatgaggtgtgaaatggtagtttactgttcaaatttgcatttcgctgtctgctctagataacagttgtttatattcataaatatttttcttatggtttctgcttttcctctcctgtctagaaatctttccatatttacttctaaaactttccaattgggatttttaatctacacaattgatttttttattttctgtaaaaattaaaattagataaatataatctattttctcatctcatttatcaactagcccaccttttctctcaatgatttgtaatgacacacgtgttacacatccactttccatacatgcaggcttctgtttctggacaaaatgacctctctccattcagtcaggttgccttgtatgtcacatcttttggattcctaagtgccttattttttgttgcttttgtgaatgagaccttttttctatggaatttttttgttacctttttactttgtcattataattaaatgttgtatgttggtcaatgctgggggatcatttctgctatctgttagacctgctgactttcctttatggtgatctgattcttgcaagtcatgacctcttctctgccaactattaacagttctatcttctcagtcttgcagtaatttatgacattacacaactcatgtctgttagagtcaaagatccaatggttactgaagtgtatggatgcaaacttgcacatactaaaattttccatgtgggaagttaaagttagggggagttaaagcaagcgctttaaggagatttttatattcgttgcagttcaagtcctaggatacaagcaaagcaacaactcttatttcctggccaatggaactgaaaattgtgattttccagagttgacaggacaactaaaaggaacaatttgctctgctgtcctgatgccagctgtaaaagaggaataattaaaagtttacttaccattggcaaaactctgtccgacgtagtattgtaactctttcacatttgttttcgtctggtttgtaacaggatcaacataatcttcagtagctgtaacattcaaaaactgactctgtcgagggctacatgtcagctcacaaaacaggttcagtaggttataaaaacaggatggacatctaaaggaaaagtaaattatattctgcatgatctcacacataatagggccagcaagaacgattttaaatagacaaagaatattttaaacttactgtaaagtgacaaattaccaagagaacatattaaaaaccagcaattctaaacttaaaacttcatgttaaaataaaggcacacctttaaaaaatgccctaattactttctgcatttattgtgtccaattataatttcaaaaagagagagatgcttctctgaattctgcactttataatttagagacatacattctctgacctagagtaaagggactttggagcatcaggaagacaattattattattttttgagaaagggtctcactttgtcgcccaggctgagtgcagtggtgtgatcacagctcactgtaaccttgagctcctaggctcaagcaatcctcccacctcagcctcccaagtagctaggactacaggtgcacaccaccacacctggctaatttttaaaatgtttttgtagagatgtgggtctgtgttgcccaggatggtctcaaactcctaaactcaagcaaccctcctgccttggccttccaaagtgctgggattatcgacatgagcgctgcaccagctgacagttttgattaagaagaaaataaaataatgagaattatgagaatcttcatcttataacctattgaaaggttttctttcaagccccggaaaatcactaggccctcctgaaacacaaggagaaatccccatggtttgtaaagatagagaacagcaatgttgttctctggctgcatgcacttcaggagcacacaactgcacaagaaccataagctgcctgctatccttcaggttcaaagtttaagctcctaatgttgacttgttacatgataaaagagctctcttttccctttggtccactgttacttgcaaaagctgtttcattagacttgcattcttgcaatcaagattactttagactccgattcagtcccagtgaccatgtaagacaaagaatgaaaaaagtgtgtcctggccttcaagagtctctgttctagtgaaggagacagagaagcacagactctctttctttcaggagccccactgctttactgcaacaaagccagaaaccacaattgtattattctaataggaatcactcttggggtacacagttttcaaaccttttccatgttactacatttaatgcccacaatcactaattttgacagctgtatatttttccaaatatcaggttgtttctcctgtttgctattataaatcaagctttggtacctctgataatatggagaaaggttggctatctttttatgtttatgtccgtatgtccataatgcctcacctacggtggatcctaaataaatgtgttttgactgagtgtacaaggctccaatttggttccatcaatgttcacaagcctttcataggatatgctggcccaattacagcctcaacttttgttgttctgaaaaaacaatttagtggtggttttccattctctattgttaacttttggtaagaagcagaatttcttcactggaagccaacttgtgccctatcaccacctgcagtgatatttgtgcagagaagcattttccctttttaatatttgcttcccaaacatctttatcagtgtgctgaagtctgaaaaatttagaaagataccacaatctgctgttctaaagaccactaccagcttgctcttttgcatatttgagaattgctggctaggcctagagaagaacatctattaccaagccctttttcactgctcagggtcatagccaacagaacagataaaaaactaagtttgacaaaaccagccagctacagcagaacaaaatttttaacagctccccgaggccggctctactgaggacctgactctatcacaacccttcaccagagggagggacaagaatgatgtgcaaagcaaagcatggggggagaggaaggactgcatgatgagagtctcaggccaggcacctgagcaggacccctaggaacctctcttccccacagtgcacagctcaagtttgaaaggagcctggccgcagtgcagacaccctgcagggtgagaacatcgcagaggaaaccaagcatcaactctgaatgcaactgggaagtgaaccaagtctggtaattattgtttttctctttatttctgacaaattgtaagagtgctttcttaaaacaaaacaaaaactgactttaaaaaaaaaaaaaactggctgggaactgtggttcacacctataatccagcactctgggaggctaaggtgggaggatcatttgagaccaggcctggccaacatagtgagaccctcatctctagaaaaaaataaaaattaggctaggtgcagtggctcatgcctgtaatcccagcctgtaataaccaggctgaggcgggtagatgacttgaggtcaggagtttgagaccagcctggccaacatggtgaaaccccacctctactaaaaatataaaacttagctaggtgtggtggcatgtgcctgcagtcccagctactggggaggctgaggcaggagaatcgcttgaacccgggaggaggttgcagtaagctgagatcatgccactgtactccagcctcggtgacagagcaagagtctgtctcaaaaaaaaaaaaataaagaaaaacataaataaaattagctagacatggtagtgcatgcctgtagtcctagctactcaggaggctaaggtagaacaatcactggagcctaggaagtttaagctgcagtgagctgtgatcacaccacaaaccactgcactctagcctgggcagcagagtgagactctgtctctattatacacacacgcatgcatacacattatacatacatgtatttttaatacataaatatatattcacctactttacatgtatacatatatgtataaatatataatatacatataatatagacatataataaataaaaatatgtaaacaaagaataaatggaaagctgagcattaccagttcacaagtatctacagcccagttgttctgtttccccagcagaacctacctggacagaaactgtagaggcagctgcaggttgtcttttagtgtctgaagctgccgaacatcacaacagagactgacattgccaaagaagaatcctggacagagttcctttcaggtgaaagagcacagacacgggagtaggcaacagttagagtaaggtcaacattcctcagtgaactaagacacattcattcatgtaatccttttgaagtacaaaagggtaagacacatcctgtatttgcaaagttattatagaattattttaaaaggctacacatttactatttattcacaagtagagatgtttctaattttctttttatttggaagctttctctcctctcctgacaatcattttatgtcttcttagggttttttgtttgtttgattcaattcaaccagagtgctacttactatttctattagtaattccagggaaagttgaaacctttaataattatgatgaaagcagcaagtgaggacaggtactgtggctcatgcctgtactcccagtacttaggaaggctgaggagggtggattgcttgagcctaggagtttgagaccaggctaggcaacatggtgaagccccatctccccaaacaaatttttaaaaaattagccaggggttgtggcatgtgcctgtagtcccagctacttgggacgctgagttgagagattgcttgagctcaggaggtcgaggacacagtgagccgtgattgtgccactgcactctagccttcagccaggataaaagagcaaggctccttctgtctcaaaaacagaaaagaaacgaacaagtgagcctaggaactctgttatcatgtcgacttgacttttgattactttaagcctctaaaaccaggcttttcacatgatttttccagttctaatatccctgtgtatcacaggatggtaaaaaaagaacaggaatcagaatcctggtagcagccaaaattcacaggctctcagtggaacacagagaaaacactgaaatgaccaggggacaaggacgtcaaagccacttagcaacagagtccatttgagtcctgaaatctaggaatcaaaaccagctaacttctaatatattttgcagatgctgcaagggcaacatacgaagtaccaaggtcagtctctaaatagcaacctgctattgggaaactttatgagaggtataaagtcagcccctgaaaaattaagcctttggagttacggtgttctttctctgcactgtatgccacaggttagagtttgagagtccgggataagacttaagcctgttagtctcatctccacctccaccctgcaataacatttaaggaataattacagaggatcttgtgatcagcattttgtgttcccagtgcctaagataatgaacttacctgcactaagtcatatccatcctttggcaatggttttggtgggccagaatattcgcaattgtacctcttgtccccatatgcaattccacactctccataccaaacacaggactgtgaaaacacctacagaaagtcaacacaaacttcagtgttaccagggtctcaatggtaaatttcaacaagaagtgcccactcaagtacaatcacagaaacttccaatgctacctgcaaaattaagtaacagcaacaggcacttaacattttgaaaaatattaattaaagcagaccaaatgcctatttgtcaagtcagtgaagtaggtaatggaaattgcttatttacataatttctatttcctgcttatttgttgataagaggaagctatagttccatgtaagaaatactcaatcacagtagagagaaaagcaagatagtgacttagcaattactaaagcactatttttgcacatctgcaccaggaactatataagctctaagtaatgaaagaatatttccatatgtatttaggttaattaatatcaatacatcatgagtaacatgaagaacaaaacaacaaaaccacaaacatcaacaccccaatgtaaagagcaagaatgaacttcctgtccttgaggctgaagtagaaagcaaagaatgtgctaactttaaggaaaaacaccgaggcaatctcaaaagaaaattttaaaacctcttatgtaaagatttctcaaaaaccactcacatttcccatgtgagagtcacaaggttgtcagaaaattcagcggaggggaggggtcagtgtgaatcatcaggtcagtgccttgctctgaaggctgctgcccaaaacgcacctgatcctctgcctcacaatggactcagaaagccacagagggcccagcttgccagggccccgggcctgcaatcgtctgttctacagggaaacagaagatatcaagaagcagccatggctcccaagaaccctgatgggaaagccataaaaaaaaaacaaatctgaacagaagtcacaacatgaaattctctccagtgacagtggcacatgacctgcacacaggcaagaagctaagtcagtctgtgttggtccttcagtatcaaaatacaaatcccacaacagtccctgaagcccaaaaacatgagaaaaagtcagcaggagattgggatttgtatgtgtggggaaatccaaggcatcaatatcacttttctctgaattcatttttcagatgttctaaaataaaaattaggacttaactcctcttgactctttgaaagtcatgtttaggccacaaaggagggaaattatacaaataaggaagtgacaacaagccttcaacaaagccacatatgaaccctgtgccaagattccaccactatttttatataaagagaatcccaattgttattcccataaacccggtgattctaaggaaaaaagaaacgtattgcaactctgggtttccaactaatggaaaaaagtcctaatgagtaaaagtcattatccatctaactaaagtttgaaaaggcaaaagctgactacagaggcagaggaaactgctgaagttcacatgaaattttaaatacaaagaactcttccctagacctcgcagaactctccagggattggcctgtctctgcctcaggggcactctggctggttacccacaggagcaggagtgacaagagacagatgtgcagtcaacacactgcagctctggcctgacaaacaggacgggtgtctggagtctaaaatccccttactcagcacttggtactatagatgtgaataaagatggcccactgctgtttaggttccttttcacaaagatcattcgttacttatttcaaagcaagtgctatttccacccacttggtggaagaggggtgggtgagaaggcggcacggagtgggatcgagtcctgggttctgatcccaagagctcctgaggctcagtgtgcttgttgagctggattgcacctgggatcacacctggagcaggttacgtaaccacgtaggagttttcctacctgggaaatgaagctcataagctctgcctacctcacaggttcctgtgaagatcaaataagggcctatctgtacatatatagtaagtactcagtaaactacagagcaccacgcaatcaaatataaggaattattattaatgtcttctacctgcttgagacctcggcaaagaggttccaaagacttaaaaaattaacacctgagcccaggaaatttgggcttgaatcaacattcaggtttgcttctcaaaaggtcatcttctagagacacagcagagaagaccaaaaaaaaaaaaaaaaaaaaaaaaaagtcatcctggctggaagtggtggctcacgcctataatcccagcactttgggaagccaaggcaggtgggtcgcttgagcccaggagtttgagaccagcctgggcaacacagtgaaaccctgtctcttaaaaacaacaacaacaacaggccgggcacggtggctcacacctgtaatcccagcactttgggaggctgaggcaggtgaatcacctgaggtcaggagttcgagaccagcctgaccgacatggagaaaccctgtctctactgaaaatacaaaattagccaggtgtggggggtgcatgcctgtaatcccagctacttaggaggctgaggcaagagaattgcttgaacccgagaggcggaggttgtggtgagccaagattgtgccattacactccagcctgggcaacaagagctaaactgtctcaaaaaacaaacaaaaaaacaaaacaaacaaaaacaacaacagccaaaaattagccgagcctagtggcacatgcccatagtcccagctactccggaggctgagctgggaagatcagcttgaacccaggaggttgaggctgcagtgagctgagatagcacctctgcactccagcctggacaacaaagtgaaaactggtctcaaaaaaaaagtcatcctgccgaaagaagcaacctaagccagcaggacccaaagacttacaaagcactggcggtgtcctaggcttaggcactattttaaatgctcttcacattgtgtccggaattggtgggttcttggtctcactgacttcaagaatgaagccgcggaccctggcggtgagcgttacagctcttaaggtggcgcgtctggaatctgtcccttctgatgttcagatgttttcggagtttcttccttctggtgggttcgtgatctcgctggctcaggagtgaagctgcagaccttcgcggtgagtgttacagctcttaaggcagcgcgtctggagttgttcgttcctcccagtgggctcgtggtctcgctgggctcaggagtgaagctgcagatcttcgcggtgagtgttacagctcataaaagcagtgtggacccaaagagtgagcagtagcaagatttattgcaaagagcgaaagaacaacgcttccacagcatggaagaggacccgggcgggttgctaatgctggcttgggcagcctgcttttattcttttatctggccccacccacatcctgctgattggtagagccgagtggcctgttttgtcagggtgctgattggtgcgtttataatccctgagctagatacaaaggttctccacgtccccatcagattagttagatacagagtttccacacacaggttctccaaggccccaccagagcagctagatacagagtgtcgattggtgcactcacaaaccttgagctaaacacagggtgctgattggtgtgtttacaaaccttgagctagatacagagtgccgattggtgtatttacaatccttgagctagacataaaggttctccacgtcctcaccagagcagctagagtgtcgattggtgcactcacaaaccttgagctaaacacagggtgctgattggtgtgtttacaaaccttgagctagacataaaggttctccacgtcctcaccagagcagctagatacagagtgtcgattggagcactcacaaaccttgagctaaacacagggtgctgattggtgtgtttacaaaccttgagctagatagactgccgattggtgtatttacaatccttgagctagacataaaggttctccacgtcctcaccagagcagctagatacagagtgttgattggtgcactcacaaaccttgagctaaacacagggtgctgattggtgtatttacaatccctgagctagatataaagactctccacgtccccaccagactcagaagcccagctggcttcacctagtggatcccgcaccggggctgcaggtggagctgcctgccagtcctgcgccgtgcgcctgcattcctcagcccttgggtggtcgatgggactgggcgccgtggagcagggggtggcgctcgtcggggaggctcaggctgcacaggaggccacggagggggtgggaggctctggcatggcgggctgcaggtcccgagccctgccccgtgggaaggcagccaaggcccagcgagaaatcgagcgcagcgccggtgggccggcactgctggggggacccagtacaccctctgcagccactggcccgggtgctaagtcccccattgcccggggccagcagggctggctggctgctccgagtgtggggcccaccaagcccacgcccacccggaactccagctggcccgcaagtgccgcacacagccccggttcctgctcgtgtctctccctccacacctccctgcaagctgagggagtgggctccggccttggccagcccagaaaggggctcccacagtgcagtgggggactgaagggctcctcaaatgccaccaaagtgggagcccaggcaggggaggtgccgagagcaagcaagggctctgaggactgccagcacgctgtcacctctcaatatgttaacccaattaatcctacaacagtttgatgagggaggcgttattataccccttttacagatgcagaaacgaaggcactgaggctaaacaacttgtccaaggtcacagtggcaaagccaggattcaaaacagagcaggtgactccagaaacagactctcaataaaagagaatcagctgcatcatgaaagtcctccctgtagcatcacaccctccccaaaccccaccgtgtgcaagagcacgagcacctgtgcactcaacagctgcacaatgggagctgctcagccttcactcccttctcaccaacagctgaaagtggagagccagcctcctggcccccaggcctgcctctgcagctgctccacctcaggggcctccacacctccatctctttctcttctgtgtttttaacctcatctctctctcagtcccttcacctgcacctccctagaaacactgctctaattatatccacaaacccctctctcagcttcagtgatctccagcttctctccagcagcactttccactagctgcccaacagcctcagtgcttaagacgaaaccaatctttcctctatttgtatttcctcctctattgccaattcctcttcaacagagtttcaaatgaaaatctcaggcacctttcgaacccacctcccatagcgaacctatcgctcactcccagggaggctccctcgtgcagcctcctgccctcactcggacccggcagtgtctctggtgcagatgcctgccgcttgcctcttccggaacaatgctcaaagttttctggtgctcagaaacctccaacccacccttcccactgcctgtgcgacaagcttcagacacctcactctggctctgcccactctcctttctacagtattccaaacctatcactctaactgcctacccttccttccttctctcccacatgaagtaggacctgcctgcctctgccttggtcatgccctaggatcaagcaaaatttatgagaattgcaaagttgtgatgttgggagaagttgccagagtattttctcacttttgtctcaactcccttgtaagacggtaaaatcctagagggcagagcctaggtgtgtaatccttcctttgaaattccctattgtattacatctggtgttcatggatgcagaacttgtcaaaactcacaatgagctgagggagtacaactggattatctaagttcagaaatgagaagtgctgattgttttggcttctacccagaatttagtagttacacagctaaagagtttctatttttaaaggttagatcatatggatatttcacaacatgctctagagtttaattactaagaaaatgactggatagggaagcttctttcaacgataggaacagttcaggaaaggttaaaaaaaagccccttctaggccaggtgcagtggctcatgcctgtaatcccagcactttgggaggccgaggtgggcggatcacgaggtcaggagatcgagaccatcctgcctaacacagtgaaaccccgtctctactaaaaatacaaaaaattagccgggcatggtggcaggtgcctgtagtcccagctacaggctgagacaggagaatggcgtgaacccgggaggcggaggttgcagtaagctgagatcgcaccgctgcactccagcctgggtaacagagagagactccatctaaaaaaaaaaaaaaatgccccttgtgctatatctcagcaactatagcaactgctaaattggaccccattcaggagctccataagcacacattattatcagaaaagctctgaactcagtgagaattctattccactgcctttaggaaatcctaaagcattaactaacatattcaaatacttactgaacatctattgttctcgaggcatggcagtaaaataaataaatgaaacaaaaataccaaacatcgactgcatgcctcattttctcagatactctatgcagtagcacagcagaattttacaggtaagtgaactcaggctcaaagatactctgaggtcacatggctcataaataacatgattttgaacaccaagttaagcattctccacccatcccccttgtcctcctgcctcccctacccccagcttctgtaccatttaaactctagtccagtttgtgcagtgatgtatcctcagaattggagaatgcactggagatgaactgtcccatccatgatgatcctatacaagtgttccttcaatataaacttgttcacttgtagaaataatgcctcccattcctatcttttaaagtatctctctaggcagttgtcaagcaatgactcccttactcagtatcactgacagtcctcaaccccagggtaggacttggccatccaccagagctgggagtgcagggcttggcaccaacacttgtgcccctgtcctggatgggtaaagctaatggcaaaacatggagagatacccagctcaagctccagtgaggcgatggaggagaggggcttgctggttaacttccctacctcattgcttctccagagagcagaggctggcctggccagtcaggacaacacaggctggagtggagggagtggcatgaagaatcctgtccagagattaagctgcctgctgcttctttggagtcagggaggcagaccaaacaaatatggcagggcatttagggtggaggctgccgggctggtctgacttctattgacggaaatctctggaagtgttttatagccaacctggcatgaacgtatctacataacaaaggataatttgtgtgtgcaccaggcctgcctgcatgtgggtgtttaagtcatatattttgagtgctaggtgtgctcagctagtccaactcttcgttttacagataacccctttagcttctggttttttatgtgactcacccaaggtcatattactagttagtcttagacatttaggagccacaaaactaaaacaaaactatgaaagtgggtgtcagtatacactgtctgcagttttttccctatggaatgttcacagtgtggtgactgaatcaggggtcaggccagcaggctaaacccattcctgatctattacggactactggaagagccacactggggacggaaccaggccttgaatgagactgctctactaaccaagtggaatatctgctgaacacccattcaattaagcttgctaaacaccaataatctagccttgaatttcaaaaaactagggcacagaagtcagaagatggcagttgaagcacccaatgtgccatctactagctatgtgaccttgggacaaatttgacccttgatgtctgcatctataaaataggaaaaacagcattacacctaccttaaaggggctctgtgaggataaaacaagatcggatgtgatagcaatggagtactatgcaaaatttgggtagcttttgtctctagtcttatgtaatctagtatatagcaccctgcaaatttttttaagagctttactcatgtaatttacataccataaaattcacccttttcaagtgaacagttcaatagtttagggcaacaattaggcaactctcccgactattttctctagttttcctcttgtccacctgatacattaattcatcctccatagctcagctcaaaaatggactctccataacattttatctttattcttatctgagcacttcttactgtattaccatttttttatgtatccagccttccccccatcaactatgaagaagacagtgatagtaattatgaacatttacacagcactttacagtgtatagacggactttttttcttttttttactacttacttattgttttggactagtcaagtgcagtagtgagcaggaggaaagagtagatcaaggagttcgatctgtaactgactttgatcaattgataacacactaccttaggaccagcctagactgatttttttaaatgggttaattcttttgatcttatcctttgttgtgtctagggaagccaattcatgtttatgaaattattttgagctcctcttgtgacctaagcaagggacagtaataagataaaattttaaagcttctctcaaatcctccaacagaacacctgcaccagagagagttggttttttaaaagttttgttgccaaagcaaatgttccaaaaatttgaaagtgagaggcacagtccagatgaagaaaaacctggctggccgcagctgatcactgccatcacctagaaaccaactgcaaatccaattttgattgccactagtttctaagtctctccccaaaatccatttcaaggcccaaatatcttatgatcaaagaatcccagtgggccaggcatggtggctcacacctgtaatcccagcactttgggaggcggaggtggatggtatcacttgagctcaggagttcgagaccagcctgggcaagctggcaaaaccccttctctactaaaaatacaaaaaattagcagggcatgatggtgcacacctatagtcccagctactcgggaggcttgatgtgggagaatcacctgagcccgggaggtcgaggctgtagtgagccaagatcgtgccactgcgctccagcctgggcaaccaaagtaagacctggtcttgaaaaaaaaaaaaaagattccagggccagcacggtggctcatgcttgtaatcccagcactttgggaggccaaggtgggaggatctccagcccaggaattcaagaccaccttgggcaacacagcaagaccttgtgtctacaaaaaatttaaaaattagttgggcatggtggcatgcacctgcagtcccagctacgtgggaggctgaggtggaaggatagcttgagcccagggtcaacacttcagtgagccacaatcaaaccactacacttcagcctgggggacagtgcaagaccctgtttcaaaaaaaaaaaaaaaaaaaaagagtcccaagtcaagtgtcctggccacatttgtagatgatattggagagcaacagttattgctcttaaggagcctgcaattcggtagttcaattaggaaatatttgtctttcacaagcatagttggcacagttaatccaattttacagaggaggaaactgaggctccagaggataactggcttacccaagatcactcttgggaacagagaagagtcaagacccacaccaaggtcttttaatgaggcagcaaatgctgttgcagcagtttaaataaagattcagaacttcagagggaaggcattctagttaggggaacaggacaagaatgtcgtagataatgtagcatgtgaaatggggccctggaagatgggcaggattttgctagcaagcagttcaatttgactggagagctgatgcccttcacagagctggaggtcaaagggcagaaaggggcacccgagatcagagatgactgatccaggcttccgctgtaggtaatctgccatgcttagaatactgcatcccttttaggagtggagggttacccaggaaagagagagcacactgtcttcatgaccagagtgattctttgttctgggtaatataacaaacactggaggaatacaaaggcctattcagcgagtccttttccctctgcccactggctcaaatttaaaaaaatctcattttccccttgattacttatgttagtaaaatttctgatcacagcatcagtcaaggagtgggaaagatggggaaagatttcccacagtcattccaatttcagatggttgttcttaatcactcacaggtcaaaagattaaccattcccagtcttctgaggaaaagccattttaatgcttaatttctacccaggcttctctatgttccaagtccctcaagataaagcttaccaaaattacagccgggaaaaataaaggctatgtctcaaaactgcatatagtttttagatgactacagggttttaaaaacaaggcagtctagtaatgttattacatcatctgtacatattgaacattaagaaaaagcaaaaatccccccaacatgtatttcagatcttacacaggacaactagtccataattccatgatagaactctactagcgctcagactgaagctaatgagctgctatcatcggtacgaattctaaaagcagacacactctctctcccaatctgtttggcttcatggctccaccccaatctgttcaggtgcactgaaagctttcagacatgaggaatttttaaaataataataggattatttccagttaaggtttacagaccttgaaaaggcctccaggcatttttgcaagagacttacaacaaacctctgacctatcccaaatgtcataaaagaagcactcattggccatcagccttgggtacttgagatttaaaaaatacttaagagatggctacttaataatgtgaagcctggctgggcgaggtggctcacacctgtaatccccaaaagaggagggcggatcgctagaggtcaggatttcgagaccagcctgaccaacacggtgaaaccccatctccacggaaaatacaaaaattagctgggcgtggtggtgggcacctgtaatcctagctacctgggaggctgaggcaccagaattgcttgaatccaggaggcagaggttgcagtgagccgagattgcgccactacactccagactgggcaacagagactctgtctccaaaaaaaagggaagcctatttaaggtcctgatctaaaactctaggaggggccaggagtggtgctcacaataatcccagtgctttgggaggccaaggtggaaggactgcttgaggccaggagttccaggctgcagtgagctatgatggcgacactgcccccacgcctgggcaacagagcaagaacctgtctctaaaataaataaattttaaaaataaattttaaaaaactctagggaaacagaatagccacattttctctacggcacataattgctattatttatttctctctcttttttgttttgacacagggtcttgctctgttgcccaggctggagtacactggcgtgatcacagctcacagcagcctcaacctcaacaatgaaaagaaaaacaaaatgtttttaagacggtgtttcaccatgttgccccggctggtcttgaactgctgagctcaagagatcctcccgcggagcccttctcctggctcttagtccattattggatcaacatcacctatccccttctgagaactaaatagaagtcgaaggagagttttttctagtccacggaaccccctctcccctgattcaccacttcctattgacgccacacctatgtgaggggcgttaatgtgcacaaggacacaattccccggaggcactctcatcctgatttggtttaacgagtcacagcgtgacactgccccactccagttttaaaagaggaaactacagacacacaaatactgaggtgctctttcccaaagctattaaaccaagcaaaagcccccagaaggagtcagcaggacaccgagttccaggccccatcctgtcgctggctaatagtgacaaggggaaattcaataccgccctgtgagtctcagtgtcctgaggtgtaaaaaggagttgatgaaaagtaacctgccctctttagaagaccaagctgacttatgtcaagtactcaaggcagtttcaccgggtgcttgaggaagtttgtgtctctttacctctgcttccacctccatcctcaggtgatgagaagaggaaataaagtggttagagctcctaaattttggagttcgtgcgcatgtagcagaattttttaaaaagcaagtagtgtccctatcccactctacccactttcctcccttcttctggtgccacatcctacacagagaaattaggtgaccacagatggaacaagctcagaacaggtcacccaagcccccactgccaccctcttccagaccacaggaaagagagcgtggccggagacagaaacaggacaagtgaggaacctccgagctctccatcgccagaccaacttccccaggacccgggcctgagccgtcgctgggcccgtcgccttccccggctctcggccccgccacgtccccacagggcgtcccggtggccggcgaccgctcacctgcgctggacacagtagcagcaggaggaggccaagggccaggccgcgagcggtcatgctgtggccgcgcaaggctgctgacgccggcggcgttcggctggttgggctccccggaggcggctctacttccccgggctgtttcagcaccccgcgcaggaggagcggaggagcaggagcaggcgctgaccgcggcagcaggctgcgcgcgccggtcaggaaggaagaaggcgtcgtcggctccgccctttctgggaggtgccgctgccgggactccctggcccgggctggggcgccgccgcgaccccgcttcaaggtccccgtgttgcccttctcctcagcccctgcaatccccgggggccaggcgcgggacttatggagtctggctcggcccgggagagtatctgtggagttgtgccaacggtttctggccgtgatgctttcccttttcgtctctgggttggagggggcgggcgaggtttcagcgaagggtagtgctgttctgggggacttccgggtaaggtcccgcccggccgcggagtctctgtttatttcggctccgacaattacgctgagcgacttctcctcccaacccagtcacctgaaaggaatctggaccccggcactttctagcagagcccggggcggtgacgcgcggtggcctgaccgtgtgacgatccgcgagtgcggcggggcggggcggggcggagcgcggggtgggcggtggcggtgcggccaggcccgggaaaaaaagtgcgggagcctcgccacctgctggcccagctgcgcagcgcagcccgtgggcgcgaggaaaccccgaggtggggaccagggtctgttttaagttctacgtgaaggcagataaagaagacgcgttgtcatttttgagccatgcgtttgatatatgtatttatctttaactctagttgtatgtgtttctggtaacgttttccctcaaatttcaagtattcagaccactcaaaagcatctgtcatttccattttgaagttaagaaaatggaggtgaagatctctttcccaacagtgaaagcaaatttacgatgaaaagactaaaccttcatctggagcaatgaccgaacccctccccaaggagtcccatgatgcagatgaccttcccatccctatcctataaagtgctgtttcactttctgtcttgccttctcacctcctcagccctgagatgtccacctggctggcctggcagtgaaactatggggatttcttcaggaccttcagcctaggtcctccacgacgacctcgtggtcctcagtcagctctgtgctctcgcttcccactccccaggctccagctcctggtgcccccactgaggatcaagtcctgtgtatgccttcatgcagggatcctcaaacggccatccccagaccagcagcaggagcatctccttggaacttgttagaaatgtaaattctcagccagggcaatgtagcaagactccctctatacaaaaaaaaaattttttttaagttagctgggcatagtggcacacacctgtagtctcagctactaaggaggctgaggcaggaggattgcttgagcccaggaggctacagttgtctatgatcatgctgctgcactccagcctgggtgatagagcaagaccctgtctcaaagacagagagaggtagaagaaaatgttacagtaagatttccaagtttataaattactttgaaggttctaagtttccataaccctccttggggaagaagaattctggttcctgtgacttacttcaggggtgcaagaccgctggagacaggagggcaggagaaagtcatgggtagactttgtttctgaggctgctactgagacctaatctcctttagttcaaagtacttagcatgccaaagcctcctactttggggtatcgttttctgagctccagtagttgagatccggagacttttttgttgaaagaatattcaataccatcttcataaggactattcagtgttgacctcagagcaataagtagaaaatggggggaaatgaaattattagatgtgcatctttataaatgtgcagaaataccttccagaaaacttctatgtagtggaaagcatacatatgtgaatataatatacaaacgttttaaacaagtggggatgtacagtacacagttctcatctggcttctttgcttttagcagtatgctttcctacctcactccttttaatagctgtaaaggattttattatgcgtatgtaacacttctgaagccatactcagagcagtgtctaaatcaatgaaatataaatcaccagccaacaagtatttcaaaataactcaattcctctacttgcattcctggtacatatgaagggtttgtgtggtcctggcaatacattataaatttatctttccttttccttttttcttttttttttttttgagacagagtcttgctctgtctcccaggctggagtgcagtgacatgatctcagctcactgcaacctccacatccccggctccaaagattctcatgcctcagcttcccgagtagctgggattacaggtgtgcgctaccacgcccagctaatttttttttggatttcattagagatggggtttcaccatgttggcctggctggtctttaactcttggcctccagcaatccaccagcctcagactcctgaagcgctgggattacaggcgtgagccactgctcccagcccgcttttcttttcggtatgctttgtcacattcctgagcttgcctggagaccacaaagcctggcatctttctgtgccctctgctttcccaatcatgctgcatcaccaaagtctaaacacttttgaacatttcccttgtagagggagaggagaaagttgacccaagactaaattatctgtagctggcagatggtaggggaaggctagaaatacttacgttaataatttttgatccactatgtaacttatttaatcagtctcttcttgggcatttagcttgtcacttgttactggaaatgatgcaatgaacatccttgtatcttttaaaaatgtttttttctgggacagagtctcactctgttgccaagtctggcgtgcagtggcatgatcatggctcgctgcagcctctacctcctgggctcaagcgatcctcccacctgtgcaccaccactcctggctaatttttgtattttttgtagagacggggtttcaccatgttgcccagattggtcttgaactgctgggctcaagcaatctgcctgcctcagcctcctaaagtgctgggattacaggcgtgagccaccactcctggcccattcttggatgtaaatctttgcaatcatgcgcaaatagaactgttggaaatacttttatattgttggatcaaaggaaatgggtatttaagttttgattgttgtcaaattgccctccaaagaaattgcagccagcaatgtatggaagtacctaaatgcaatctgtgattttatttattttgtttcttattttaaaaaatattggggctgggcacggtggctcacgcctattatttcagcagtttgggaagccggggcaggtggatcacctgaggtcaggagttcgagaccagcctggccaacatgctgaaactccgtctcaattaaaaatacaaaaattggccaggcgcggtggttcatgcctgcaattccagcactctgggagccgaggcaagtggatcacctgaggtcaggagttcaagaccagcctggccaacatggtgaaactccatctctactaaaaatacaaaaaattagccaggcatggtggtggatgcctgtaattccagctactcaggaggctgaggcaggagaatctcttgaacctgggaggcggaggttgcagggagctgagattgcgccattgcactgcagtctgggcaacaagaaattaggctgggcgtgatggctcacacctgtaatctcagcactttgggaggctgaggtgggtggatcatgaggtcaggagatcgagaccatcctagccaacatagtgaaaccccgtctctactaaaaatacaaaaattagccgggggtggtggtgcatgcctgtaatcccagctagtcgggaggctgaggtgagataatcacttgaaccagggagttggaggttgcagtgagccgaggtcgccccaccgcactgcagcctggctacagagcgagactccgtctcaaaaaaaaaaaaaaaaaattagctgggcgtggtggcacacacctgtaatcctagctactcaagaggctgaggcaggagaattgtttgaacccgggaggtggaggtttcagtggccgagatcacgccattgcactccagcctgggcgacagagcaagactccgtctcaaaaaaaaaaataaataaaataaaattaggatgctttgatttgtatttctttaattataagtgagattaaaaatcttttcacacatttataagtaattttatttatttttctgtgcttttttcttttttcttttgagacagagtctcactgtgtcacccaggttgtagtctagtggcatgatcacagctcactgcagccttgacctccctggctaaagtgatcctcctgcctcagcctccaaagtgctggataataggtatgaaccaccatgccaagccaataaaattttattaccaaaaaaacctttgatttcttctaaaatttttttaaaaagctttttaaaaaatttttttctgctgctgatctgcaaccttcaaagtaggtagtccttcaaataggcagagaaaaaaagaatgcctacctacctaacaaattgcaagcttgcctagttcctaacctgaagcctaaagttcaataacagaaaatgaagatagaactagggttttggggtaatagaatgtaatcaatgtcatttagtgacgtctgaggccattgcacaaaataccaaagactggtgtgacttaaacaataggaatttatctgttacagttctagaggttagagagttcaagatcagcatggggagcttatttggttcctggtgagggctctcttcctggcttgtagacagcaccttctccctgtgtccccagatggtgtttccttaagtgtgtgctttcagggagaaagatttctctctctcttcctcttcttcaacaatcctattgaattaaggcccctcccttatgactttatttaaccttaattacctcctaaaagccttatcttcaaatacagtcaccttggggggttagggcttcaacacaagacatttgggggagcacaattcagtccctagcacctttccttttactcagggctgcattatgacttgtgtgggccccaggcacctttgcctttaaggacccctttttccttcaaaaaaaaaaatttaaaatgagagtttccaattgcattataaagacacatataacgctggctgaattcattattatatgctcattattacagtattcttatttttgttctgatttcaaaagaaattaaaattaaaacattttcatgggacagtaaaattatcactgtgtctactgtgcctaataagttgatctggttttcgcagccagcatcgtagaactattccctatagtagtcatggacattgtaaattttttgatcgccttccccaaaaaacctccaggaccagcagtggagctggctctaaaagaagcgcctatagagagtgggaggctgtccagctgaacacagggaacagctcacacctcccttcctccagcaggctacgaattgccaacacattttggtgaaatataggagagctttagttaatgcttctgccaaccccctaaggaggttcaggttgagcatttttgagaactctttttgttaatagacttttccttttaattaagatataatattcatatatgaggtatacagaacttagctgtacagcttgatgagttttctactttttttttttgagactgagtctcactgtgtcacccaggctagagtgcagtggtgtgatcttggctcactgtaaactctgcctcctgggttcaagtgattcttgtgcttcagcatcccaagtagctgggatcataggcacactccaccatgcctggctaatttgtgtatttttagtaaagacggggtttcgccatgttgcccagggtggtctcaaactcctggactcaagtgatccacctgccttggcctcccaaagatctgggattacaggcatgagccactgcgcccagccaagtttcttttatgtgttaaacacttttattagttgtctattactgaataacaaattactccaaaacttagtatattaaatgaacaaacatttattttatcccagtttctgccagtcagggatttgggtggttctaggtggttctggctcagggtctctcctgaggttatggccaagaagttggcccaggctaccatcatctgaaggcttgactggggctggaggatctgctgttgaagatgctgtgggaagctgggctcggtggctcacacctgtaatcccagcactttgggaggccaaggtgggcggatcacttgaggtcaggagttcgagaccagcctggccaacatggtgaaaccctgtctccactaaaaatacaaaaattagccgggcatggttgcacatgtctgtaatctcaactactcgggaggctgaggcaggtgaattgcttgaacccaggaggccgaggttccagtgagctgagatcatgccactgcactcctgcctgggtgactgagcaagactctgtctcaaaaaaaaaaaaaaaaaagatgctgtgggaaggaggcctcagttcctcctctccataggctgctgagtgtcctcaggacttggcagctggcttcctccagaaggagtgatccaaaagggattgagagcaaggcagagccataatgtctgttatgagttagcctcaaatgttatatgccatcacttctgccatgtaatactgggcacacagaccagtcctgatgcagtgtaggaaggggaccagacaaggacaagaggaggggagcactggggccatcttggaggctggcaaccacaacatccatgtagccaacacccagaggaaggatatggaaactttagcacttcagaagcctcctttatgcccctttcccagtcgatatcatcacccctcctttaaccgggaggcaaccactcttctgatttctctcactgtaagttggttttgcctgtccttgaacttcatgtaaagggaatcatactcctctgcgtctggtttctttcactgaacattatgtgtgtggctcatccacattacttgtggtggtagcatcttttaaaagaattgctgtgtagtattccatggctcaaacatatcatggcagacatctgggttgtttcttcttccagtttgggctgttacaaataaaggtgctgtgagcactgttgtacaggtcatgtgttcagtatacacactcaattactttgggttctgtgatagactttttaaactctttacttacgcaagccaaattttatagacatcttcatttaaaatagcttacagctacaactcatgactttagtaccaatggttatgacctactcggaaatgggcattgttgctcagaattctggtaaaatgttactcatcctagtaaggaaggatgtttgagttggtgattaatccagtcatgggttgtggtgtaacttccactcagttaggatgctaccagagttggaatgacttgtggtttagcagtcagggtttcaaactggcattgccttccctgcaggatttgctcacaggacatagtttcctttgccaggggtggtttttgatcaaatgtttcctaaaatggagagtccaactcctgtaaactgaagactttctaagactattcttaaaacttgaaatgtaggaataacaacagcatttcactcattaaagctcggaggattcaatcctagtgagggagggaagaagaaccaaagatagcggaaggaattttttctgttgacagagataaggctgacatgtcacctaagaactgaagatctttaattaacttcctttatgttatttttattttactttattttatttttactttttgagatggagtcacactctgtcgcccaggctggagttcagtggtgcgatcttggctcactgcaacctccgcctcctgggttcaagtgattttcctgcctcagcctcctgagtagctgggattatgggcgcccaccaccacacctggctaatttattaagttttagtagggacagggtttcggcatgttggccaggctggtctcgacctcctggcctcaagtgatctgcccgccttggcctcccaaagtgctgggattatagatgtgagccactgtgcctagctgaattcctttgttgaaacataacctcattcatattaataaattaattttttttttgagagagagggaattgctctattacccaggctggagtgcagtagtgagatcacagctcgacctcccaaggctcaagtgatcctcctaccttagcctcctgagtagctgggacttctggcacacaccaccatgccaggctaattttttgtattttttgtacagacggagtctcactttgttgcccaggctagtctcaaactcttgggctcaagtgcttttcccaccccagcctcccaaagtgctgggattagaagcatgagccaccatgcctagcctcactcatattttaaaattacctgaaagtattgctaaaaataaggattaggtcaccaggaaaagaatcgaagactttccagacccagtgatacataggttatttaactgagggctaagtatagtcagagggcccagagaaaacacctctgtgtgactagtttaccctccatgtgttcattacattaagcagaagaataattattttcacatttctcgactagaatgtctaatgctagttttgcctgtcattttttgtttttgtttttctccatgctttgaagtacaaatactagggtctgagctgctatggctcaatggcatgaaatatcataacatggtgtggctttgttcacagccaggcatgttctaagcactttagcatcttttcacagtgagatgaagttcaccaatttggctgggcaaggtggctcatgcctgtaatcctagcactttgagaggccaaggcaggcagatcgcttgagtccaagatttggaggccagcctgggcaacatggcgaaactccagctttaccaaaatacgaaagttagccaggcatggtggtgcgtgcctgtagtcccagctacttggtaggctgaggaaggaggatcgttcgaacccaggatgcagaggttgcagtgagttgagatcgtgccattacactccatcttgggtgacagaccaggaccctgtctcaaaaaaaaaaaaaatcaccaattaaaaccaatcaaccagcataggtatagatccgcaaccataaattatctcatttgaccaggcctgtttgcattgcaccacgcctatttgcatctctatagggtggtaccaagtctgtttttttcatgttgccttagtcttagtacagagcagaggcaatgcacactgatagttggccggtgattcctagaaagcatcaggagtatcttcacaaatacaattctatccagtgaggagtagaatcatttcaagggaataattttatttaatttaacgttagctccaggtccactcaccaatccttatccataatctccattacaaggccagaattcttttttttttctttttttttttagatggagtctcactctgtagcccaggctggagtgcagtggcacgatctcggcccactgcaacctctgcctcccgggttcaagcgattctcctgcctcagcctcccgagtagctgggattacaggtacctgcccctgtgcccggctaatttttgtagttttagtagagatggggtttcaacatcttgaccaggctggtcttggaactcctgacctcgtgatccaccctcctcggcctcccaaactgctgggattacaggcaagagccaccacgcccagccacaaggccagaattctttgatgactgaacaagctcatcaaagacagagtggtggagcaaaagcagcctcgagtttcccagcctttgtgtcatatggccacacttcttcacgtggttcgc

SEQ ID NO: 98 - DNA, 22272 bp, Homo sapiens
gagcatgatcaaaggaagagaaccaataaaggagaggttggggagcagtcagagaagcagggcacggggggcgggggatgccaagcagagacagggcagccatgtttgaggcttcaaagaggtctagtaaatgagggttgaaaagattgttgggttcaggaactagacgattacaaattttgagaaaaccgtttccatttaatagaggggcagaaatcactttacataggttgaggaatgagtgggaggtgaggaaaaggaggtggtgggcatgaggtcagaatggtgaacacagaataactgagaatcatctcttagttctacccacagattttacagttgagggaaattttaccagttcctgaaaaagtggttcgttaagggggctagtcttttgagacatcacacgaaaacggaaggtgagatagactggacatttgagggagaaatattccaaggaaggatcttttttgttgtttattttcaagaaataaaattgaaggtaaaatgaagatgcttaaagagacaaagataggccaggtgcagtggctcacacctgtaatcccagcactgtgggaggccaaggtgggcagatcacttgaggccaggggttcaagactagtatggccaacatggcaaaaccgcatctctacgaaagatacaaaaattagccaggcgtggtggcacatgcctgtggtcccagctattcactgaggtgggagaatcgcttgaactcaggaggcagagggtgcagtgagccgagatcacaccactgcactccagcctgggtgacagagcgagactcagtctcaaaaaaaaaaaaaaaaaaagcccaggtgcggtggctcacccttgtaatcccagcgctttgggaggctgaggtgggcagactatagatatcaggagttcaaaaccaacctagccaacatagtgaaatgctgtctttactaaaaatacaaaaattagctgggcgtggtggcacacgcctgtaaccccagctactcaggaggctgaggcaggagaatcacttgaacccgagaggtagaggttgcagtgagccgagatcgcgccactgcactccagcctgggcaacagagcaagcctatcccaaaaacaaacaagaaagggagagatagtgaaaacataagcaagaagtggggagagaatatagtaaagatagaggaagtgggatagagtacagataaaaggatcagtcttggaaacaagaaaaagtactgtgagtcagtatgtaaggaaagattaaatataacaaaattaaggaaaaagagggaagtgagatccacacttgatggccttaagctcaatgaaatattaatagatgagagtgaagaacatcagaggcacggagatttagaacatcacgcacagtagtataatggggagtcaacaaagaatgagtaaaagttgtgtccaagaacactgatgactctctgagattagctggccaggattagttataggcctcttatggtgactcagctgtctactgcagcgcttggcagcctaagacaaagccccaagaatgagaccacttagtttacccaagtcaatttttgagacagagtttcactcttgttgcccaggctggagtgcaatggctcaatcttggttccctgcaacctctgcctcccgggttcaagcgattctcctccctcagcctccagagtagctgggattacagttgcccaccatcacgcccagctaatttttgtatttttagtagagatggggcttcaccacattggccgggctggtctcgaactcctgacctcaggtgatccgcccaccttggcctcccaaagtgctgggattacaggtgtgagctacggtgcccggcggtaagagattctaaaatgcagacaaagtggagttgaaattgttgaccatgcagtacatgttaaatcaacaagcaaaaccaggaaagcagaagcagccggaagtcttggtaagaataaagaactgattcaaggggaggcagagagtgggagatgtgaaaagtgagtggttgtgatgagaagggtaattcagagatcaagatcttgaaggcataattcttccaagtgatgctggggtttgaggtacaaccttactcctgggtggctaaaatggaggagggaagaagaggctgtaaaaccagtagacttgagaaacttggagaattgagaggccagactgtaagactcatctgatctgtgtggcttctttttttatttttatttttttcctctgagacgaagtctcgctctgtcacccaggctggagtgcagtggtgtgatctgggctcactgcaagatccgcctcccgggttaatgccattctctcgcctcagccttccgagtagctggggctacaggcacccaccaccacgcccagctaattttgtttttgtatttttagtagagacggggtttcaccttgttagccaggatggtctcgatctcctgacctcgtgatccacccgcctcagcctcccaaagtgctgggattacaagtgtgagccactgcgcccagccgatctttgtggcttttaaagtcactaaagatggtggtaggaggccgggtgcggtgggtcatgcctgtaatcccagcactttgggaggctgaggcgggtggattgcttgagctcaggagttcaagaccagcctaggcaacatagcaaaaccctatctctggaaaaaaaaaaaaaatacaaaacttagccgggcacggtggtatgcgcctgtagtcctagctactcaggaggctgacgtgggaggatcacttgagcccaggaggtcgaggctgcagtgagccaagatcacgccactgcactccagcctgggtgacagagcaataccttgtctcaaaaaacaaacaaacaaggatgatggtagggataagatgtggagaaagactgagctagttatacaagttgttaagagcataataaatattttgatggataagattgtgctgtgaagacaggaagagcatggcaaatgcaaaaggcacgtgctttgggagatgaggaggagtttatcagtggtctgggggagagaaaataacgacccctctcttctgccttcattcccctagtgatggaggtcgaagaaagagcaaccttcaccacagagaggagtagcatcattaggggaaagccaggtttcaaaatgcccagaggaaaatgctttcaaacatagaagacaggatttgaaaatgtgaagagttccaccaaatattgtgaaatggattggtagaagggtccttgtggggtagggaattgaatccagggaggttaaatcccagtgggaattcagaagactaagtctggagagtttagcttctaggagcaggaggttgttgcctctggaattcagaatggaagatgcactgcatccattgtgaggggaaacaagtgcctcaaaggggtcttatagggatgcacaagataagttccatggctttaaacaccatcctcatgctgaccatgcccaggtttctttctctagcttggaccttgcccctgaaatccagatgtgtatctgcccagtggcatctctacttgcatgtctaatagacttagacttaccacacccaaaatagaattttttagtttttccatccatcagaatcctgcttctctcccagtatctacatctcccacccatcaatccatcatctagtcctgttgtttctacccctggaatgtataatatatcccaaacttgtctacttctctccatctccatggctgccactattttctcttcaccatcaatgccactgccacctgtctcctaccagccagcctaaacacaggagccacagtgatcttttaaaaacaagtccaggctgggcgcgttggctatgcctataatcccagcactttgggaggccgaggtgggtggatcacgaggtcaggagttcaagaccagcctgcccaacatgatgaaaccctatctctactaaaaataccaaaattagccaggcacggtggcgcatgcctgtaatcccagctactcggggggccgaggcaagagaatcacttgaacctgggaggtggaagttgcagtgagccaagatcatgccgtagcactccaacctgggcaacagagcgagacgccatctcaaaaaaaaaaaaaagtccaggcaaggctcagtggctcatgcctgtaatcccaacactttgcgaggctaaggtgcaaggattgcctgaggccaagagttgaaggctgcagtgagctatgatggtgccattgcactccaacctgggcagaaaagtgagactccatctcttagaaaaaaaaaaccaggccgggtgcagtggcacatgtctgtaattccagcacttcgggaggctgaggcaggcggatcacttgaagtcaggagttcaagaccagcctggccaacatggtgtactttctatactaaaagtacaaaaattagccaggcatggtgacatgcacctataatcccagctacttgggagactgacataggtggattgcttaaacctgggaggcagaggttgcagtgagccgagattgtgccactgcactccagcctgggtgacagagcgattctgtcttaaaagaaaaaaaaaaaaaaaaaaggctgggtgcggtgtctcacgcctgtaatcccagcactttgggaggccgacgcaagtggatcacctgaggtcaggagttcgagaccagcctggccaagatggtgtactttctctactaaaagtacaaaaattagccaggcatggtggcatgcacctataatcccagctactcaggaggctaagacaggagaatcgtttgaacccgggcagcagaggttgcagtgagctgagattacgccattgcactccagcctgggcaacagagtgagactccgtctccaaaaaaaagaaagaaaaaaaatccagggccagtgtggtgactcatgcctgtaatcccaaaactttgggaggctggcccagcatggtggctcacacctgtaatcccaaaactttgggaggctgaggcaggcggatcacctgaggtcaggagtttgagatcagcctgactaacatggtgaaaccccatctctactaaatacaaaaaattagccgggaatggtggcatgcacctgtaatcccagctacttgggaggctgaagcaggagaatcgcttgaacccaggaggcagaggttgcagtgagatgagatcagtcattgcactccagcctgggcaacgagcgaaaccgcctctcaaacaaacaaaaaaaaactttgggaggccaagatgggcagatcacttgaaaccaggagttcgagaccagcctgagcagcatagaccctgtctcaacaaaaattttaaaatattttttaaaattagccaggcacagtggcacacacctgtagtcctagatacttgggaagctgaggtggaaggatgacttgagcccatggttttgaggttgcagtgggctatgatggtgccactgcactccagcctaggccacagagcaagacaccatgtcaaaagaaaaaaaaatccaatcacctctgctcacctccctctttctctctctctctctctctccctccccctctctcccctgcaacacacacacacacacacacacacacacgcacgcatgcacgcaccacacactctgacgacctttaaaggcttcctgtggctggatgaaatctagaggctttacccttcttgcatggccctgcatgacctggcccctgccctcctctctgacctcatctcccacccgcctcccagtctctctctctgctccagccacactggccttctgtttgtcgtcaacacccccagcttggttccgccttccagcctttgcagtagctgctccctttacctgaaatgctttgctcccaaacttttacctggtcactattttttgtcatttgggtctcagctccagtgccacccaaacactcaaagaggattttgctgactactgtatttaaaagtagctccctgccactcttacaacatcagcctgtcttattttctcatagtaccaatttcttcttcagtttctttcttttccgtctggcctcactggaatacaagctccacaggtgctggtaccttctctgatccctttgcctccatgtccctcctgccttaggacaatgcccagcatgtgttaggcacgcagatactcactaaatggaggaatggatgaataattcataaagcaggataaagttcaactttaggcttgtggctcagattggacttacatttagagtcagatttaagtttagtgttaggagtggtggtaaactggtttcaagattagccctagaaacagggttgggttggggtagaggagaagttttatttagggggttattaattgggatgtgtttagatttaaggttagggttacagttggggttgagtttgagttgtgatttgggttgaggttaaatttgggttagggttgatgttggtattaaatcccaattcaggttttgaggctaagttcaagtttgaagctaatgtcatttcagtctcatttggaggcttcagagatttcactagtttctccacaaagaccactataaagactgtatttccctgagtctggggcacaagactccagtcatcagctctcccacccagggaaagtcccaaaccaactgctggcctgcccaagaaagaaaccaaattcatacaacctccgaaactgagattgaaaccaagattggcccatctcaaggagcatccttcgcatatctcacatgcacgtgacactgagcctcagcccagtcttacccttccttcctctgtgtctctcatgtctccccatcacccttcttgccttcccttttttgtctttcaatgtcccattcttcctctttaatttaaatttctctctgtgtctcactgttaattgcaatacctttttttgtttgcttgttttgttttgttttgttttttggtttgtttgtttgaaatggagtctcactttgttgcccaggctggagggcagtggcacgatctcggctcactgcaacctccgcctcctgggttcaagcagttctcctgcctcagcttccctagtagctaggattacaggcgcgtgccaccatgctcggctaattttttgtatttttagcagtgatggagtttcaccgtattagccaggattgtctctatctcctgaccttgtgatctgctcgcctcagcctcccaaagtgctgggatgacaggcatgtgccactgctcctggccttgtaataacattttatattttaatatagctcagctggggtcccagtccatcagctcataccattagagaagcagaaagagacaacaggaagcaaaaaggaccctgagagaaagggcaacacagagaaaaagaaaggagcaggggctaaaagggaaacccacactgacacaagagataataaggttaaaagaatgagaagaaggttgggcgcagtggctcacgcccataatcccagcactttgggaggccaaggctggtgggtcacctgtggtcaggaattcaagaccaacctggccaacatggtgagaccccgtctctactaaaaatacaaaaaaaaatttggcgggcttggtggcgtgtgcctgtaatcccagctactcgggaggctgaggcaggagaatagcttgaacctgggaggcagaggttgcagtgagccaagatcgtgccactgcactccagcctgtgcgacagtgagaaactgtctcaaaaaaaaaaaaaaaggaaaagaaattttctgacctatctcatctgatagtaggttataagaccctcattccagaagaggttctgccctatacctgggaggaaggaatgctgtacagagagaccaagaagaatatggccaggccttgctgggatccccccagtcccagtctgtgaccattagatgatactccttttgttcaattacatttctgcacagctgttcattcttcatcaaatctaagcataaaaatagttttcccctgggtccttgggtcttcatttctgaaggctcccatgtcacctaaaactttgattaaataaatgtattatgcttttctcttgttaatctgtcttttattataggagtattggccataacccttatgatgggtcaggaagggatcacccctttctgcccctacagaaataatagctaagactagtaaagcataaaaggcaaaggggcaggtcctcaagtagagaagaacaggagaaatagctcatacacacccagaatgttacttacatgtccctccatgttacaccaagacccctcagggaccttgtgcctggggagagaagtggtctgccccatgcaacagtgggctttaccccgggtcaccaccagccccagctccaacccctctaacactctccaagtaaaatcacatcagtagcagtaataatatttgaggtgacaagttggtattatctcaaacttaggaaaagtgaataaagtcatctttagaaactgctttttttaaaccttgtaacttgcaagctaagtgaaaatgggctcatgtatgagaatgttcgtgttagacattttttgtgttagacaaaaactagaaacaaaccaaatccccatcaacagaatatattagaatatattgatacaatagaatattacatcataatttttttaaaaaacattactgatacatacaaccacgtatatgaatctcacaaacataatgctgactgaaagaagtcaaacagaaatgagtacattctgtgtgatttcatttatatgatgccccaaaccaggaggaaataatctatggtgataaaagtgagagagtggttggttatctttggagggtatcagcagggagggggcatgagggaacctgctggggacctgaaaatacgtggagctgggtggtggctacatacagatggaaaaattcatcagctgtacacttaagaggtgtccacctcatacctaagttacatatcaataaaaaggaaaaaaattttggaaactttttttttttttttttgagacagagtcttgctctgtcccccaggctggaatacagtggtgcgatcttgactcactgcagcctccgcctcccaggttcaaataattctccagcctcagcctcccgagtagctgggactgcagatgcgcaccagcacgcctggctaatttttgtatttattatagagatggggtttcaccatgttggccagctggtctcaaactcctgacctcaagtaatccgcccacctcagactcccaaagtgccaggattacaggtgtgagccactgcaccaggcctggaacaattttaaaataatgtattggctctgcaaatgcagcttcagaacaagtcccttagctgtccccaccccaccctaagtcaccacccttaagcctcacccatgtggaattctgaaacttcctttgtagaaaactttggaaggtgtctgccacattgatcctggaatgtgtgtttatttggggttatataaatctgttctgtggaagccacctgaagtcaggaagagatggagggcatccttcaggagtgagatgagacctcatcatacttgactgtccagcatcatctctgagtaaggggaccaaaaaatttatcttccaaactaggacactttcaagagtggaagggggatccattaatattttcacctggacaagaggcaaacaccagaatgtccccgatgaaggggatatataatggaccttcttgatgtgaaacctgccagatgggctggaaagtccgtatactgggacaagtatgatttgagttgtttgggacaaggacaggggtacaagagaaggaaatgggcaaagagagaagcctgtactcagccaagggtgcagagatgttatatatgattgctcttcagggaaccgggcctccagctcacaccccagctgctcaaccacctcctctctgaattgactgtcccttctttggaactctaggcctgaccccactccctggccctcccagcccacgattcccctgacccgactccctttcccagaactcagtcgcctgaacccccagcctgtggttctctcctaggcctcagcctttcctgcctttgactgaaacagcagtatcttctaagccctgggggcttccccgggccccagccccgacctagaacccgcccgctgcctgccacgctgccactgccgcttcctctataaagggacctgagcgtccgggcccaggggctccgcacagcaggtgaggctctcctgccccatctccttgggctgcccgtgcttcgtgctttggactaccgcccagcagtgtcctgccctctgcctgggcctcggtccctcctgcacctgctgcctggatccccggcctgcctgggcctgggccttggtgggtttggttttggtttccttctctgtctctgactctccatctgtcagtctcattgtctctgtcacacattctctgtttctgccatgattcctctctgttcccttcctgtctctctctgtctccctctgctcaccttggggtttctctgactgcatcttgtccccttctctgtcgatctctctctcgggggtcggggggtgctgtctcccagggcgggaggtctgtcttccgccgcgtgccccgccccgctcactgtctctctctctctctctctttctctgcaggttctccccatgacaccacctgaacgtctcttcctcccaagggtgtgtggcaccaccctacacctcctccttctggggctgctgctggttctgctgcctggggcccaggtgaggcagcaggagaatgggggctgctggggtggctcagccaaaccttgagccctagagcccccctcaactctgttctcccctaggggctccctggtgttggcctcacaccttcagctgcccagactgcccgtcagcaccccaagatgcatcttgcccacagcaccctcaaacctgctgctcacctcattggtaaacatccacctgacctcccagacatgtccccaccagctctcctcctacccctgcctcaggaacccaagcatccacccctctcccccaacttcccccacgctaaaaaaaacagagggagcccactcctatgcctccccctgccatcccccaggaactcagttgttcagtgcccacttcctcagggattgagacctctgatccagacccctgatctcccacccccatcccctatggctcttcctaggagaccccagcaagcagaactcactgctctggagagcaaacacggaccgtgccttcctccaggatggtttctccttgagcaacaattctctcctggtccccaccagtggcatctacttcgtctactcccaggtggtcttctctgggaaagcctactctcccaaggccacctcctccccactctacctggcccatgaggtccagctcttctcctcccagtaccccttccatgtgcctctcctcagctcccagaagatggtgtatccagggctgcaggaaccctggctgcactcgatgtaccacggggctgcgttccagctcacccagggagaccagctatccacccacacagatggcatcccccacctagtcctcagccctagtactgtcttctttggagccttcgctctgtagaacttggaaaaatccagaaagaaaaaataattgatttcaagaccttctccccattctgcctccattctgaccatttcaggggtcgtcaccacctctcctttggccattccaacagctcaagtcttccctgatcaagtcaccggagctttcaaagaaggaattctaggcatcccaggggaccacacctccctgaaccatccctgatgtctgtctggctgaggatttcaagcctgcctaggaattcccagcccaaagctgttggtctgtcccaccagctaggtggggcctagatccacacacagaggaagagcaggcacatggaggagcttgggggatgactagaggcagggaggggactatttatgaaggcaaaaaaattaaattatttatttatggaggatggagagaggggaataatagaagaacatccaaggagaaacagagacaggcccaagagatgaagagtgagagggcatgcgcacaaggctgaccaagagagaaagaagtaggcatgagggatcacagggccccagaaggcagggaaaggctctgaaagccagctgccgaccagagccccacacggaggcatctgcaccctcgatgaagcccaataaacctcttttctctgaaatgctgtctgcttgtgtgtgtgtgtctgggagtgagaacttcccagtctatctaaggaatggagggagggacagagggctcaaagggagcaagagctgtggggagaacaaaaggataagggctcagagagcttcagggatatgtgatggactcaccaggtgaggccgccagactgctgcaggggaagcaaaggagaagctgagaagatgaaggaaaagtcagggtctggaggggcgggggtcagggagctcctgggagatatggccacatgtagcggctctgaggaatgggttacaggagacctctggggagatgtgaccacagcaatgggtaggagaatgtccagggctatggaagtcgagtatggggacccccccttaacgaagacagggccatgtagagggccccagggagtgaaagagcctccaggacctccaggtatggaatacaggggacgtttaagaagatatggccacacactggggccctgagaagtgagagcttcatgaaaaaaatcagggaccccagagttccttggaagccaagactgaaaccagcattatgagtctccgggtcagaatgaaagaagaaggcctgccccagtggggtctgtgaattcccgggggtgatttcactccccggggctgtcccaggcttgtccctgctacccccacccagcctttcctgaggcctcaagcctgccaccaagcccccagctccttctccccgcagggacccaaacacaggcctcaggactcaacacagcttttccctccaaccccgttttctctccctcaaggactcagctttctgaagcccctcccagttctagttctatctttttcctgcatcctgtctggaagttagaaggaaacagaccacagacctggtccccaaaagaaatggaggcaataggttttgaggggcatggggacggggttcagcctccagggtcctacacacaaatcagtcagtggcccagaagacccccctcggaatcggagcagggaggatggggagtgtgaggggtatccttgatgcttgtgtgtccccaactttccaaatccccgcccccgcgatggagaagaaaccgagacagaaggtgcagggcccactaccgcttcctccagatgagctcatgggtttctccaccaaggaagttttccgctggttgaatgattctttccccgccctcctctcgccccagggacatataaaggcagttgttggcacacccagccagcagacgctccctcagcaaggacagcagaggaccagctaagagggagagaagcaactacagaccccccctgaaaacaaccctcagacgccacatcccctgacaagctgccaggcaggttctcttcctctcacatactgacccacggctccaccctctctcccctggaaaggacaccatgagcactgaaagcatgatccgggacgtggagctggccgaggaggcgctccccaagaagacaggggggccccagggctccaggcggtgcttgttcctcagcctcttctccttcctgatcgtggcaggcgccaccacgctcttctgcctgctgcactttggagtgatcggcccccagagggaagaggtgagtgcctggccagccttcatccactctcccacccaaggggaaatggagacgcaagagagggagagagatgggatgggtgaaagatgtgcgctgatagggagggatggagagaaaaaaacgtggagaaagacggggatgcagaaagagatgtggcaagagatggggaagagagagagagaaagatggagagacaggatgtctggcacatggaaggtgctcactaagtgtgtatggagtgaatgaatgaatgaatgaatgaacaagcagatatataaataagatatggagacagatgtggggtgtgagaagagagatgggggaagaaacaagtgatatgaataaagatggtgagacagaaagagcgggaaatatgacagctaaggagagagatgggggagataaggagagaagaagatagggtgtctggcacacagaagacactcagggaaagagctgttgaatgcctggaaggtgaatacacagatgaatggagagagaaaaccagacacctcagggctaagagcgcaggccagacaggcagccagctgttcctcctttaagggtgactccctcgatgttaaccattctccttctccccaacagttccccagggacctctctctaatcagccctctggcccaggcagtcagtaagtgtctccaaacctctttcctaattctgggtttgggtttgggggtagggttagtaccggtatggaagcagtgggggaaatttaaagttttggtcttgggggaggatggatggaggtgaaagtaggggggtattttctaggaagtttaagggtctcagctttttcttttctctctcctcttcaggatcatcttctcgaaccccgagtgacaagcctgtagcccatgttgtaggtaagagctctgaggatgtgtcttggaacttggagggctaggatttggggattgaagcccggctgatggtaggcagaacttggagacaatgtgagaaggactcgctgagctcaagggaagggtggaggaacagcacaggccttagtgggatactcagaacgtcatggccaggtgggatgtgggatgacagacagagaggacaggaaccggatgtggggtgggcagagctcgagggccaggatgtggagagtgaaccgacatggccacactgactctcctctccctctctccctccctccagcaaaccctcaagctgaggggcagctccagtggctgaaccgccgggccaatgccctcctggccaatggcgtggagctgagagataaccagctggtggtgccatcagagggcctgtacctcatctactcccaggtcctcttcaagggccaaggctgcccctccacccatgtgctcctcacccacaccatcagccgcatcgccgtctcctaccagaccaaggtcaacctcctctctgccatcaagagcccctgccagagggagaccccagagggggctgaggccaagccctggtatgagcccatctatctgggaggggtcttccagctggagaagggtgaccgactcagcgctgagatcaatcggcccgactatctcgactttgccgagtctgggcaggtctactttgggatcattgccctgtgaggaggacgaacatccaaccttcccaaacgcctcccctgccccaatccctttattaccccctccttcagacaccctcaacctcttctggctcaaaaagagaattgggggcttagggtcggaacccaagcttagaactttaagcaacaagaccaccacttcgaaacctgggattcaggaatgtgtggcctgcacagtgaagtgctggcaaccactaagaattcaaactggggcctccagaactcactggggcctacagctttgatccctgacatctggaatctggagaccagggagcctttggttctggccagaatgctgcaggacttgagaagacctcacctagaaattgacacaagtggaccttaggccttcctctctccagatgtttccagacttccttgagacacggagcccagccctccccatggagccagctccctctatttatgtttgcacttgtgattatttattatttatttattatttatttatttacagatgaatgtatttatttgggagaccggggtatcctgggggacccaatgtaggagctgccttggctcagacatgttttccgtgaaaacggagctgaacaataggctgttcccatgtagccccctggcctctgtgccttcttttgattatgttttttaaaatatttatctgattaagttgtctaaacaatgctgatttggtgaccaactgtcactcattgctgagcctctgctccccaggggagttgtgtctgtaatcgccctactattcagtggcgagaaataaagtttgcttagaaaagaaacatggtctccttcttggaattaattctgcatctgcctcttcttgtgggtgggaagaagctccctaagtcctctctccacaggctttaagatccctcggacccagtcccatccttagactcctagggccctggagaccctacataaacaaagcccaacagaatattccccatcccccaggaaacaagagcctgaacctaattacctctccctcagggcatgggaatttccaactctgggaattccaatccttgctgggaaaatcctgcagctcaggtgagatttccggctgttgcagctggccagcagtccggagagagctggagaggagccgcattctcaggtacctgaatcacacagccaagggacttccagagattcgggtgtctaggcttcaaatcaccctgtcctaactctgcaacctgaaccagccacttaacctatctatccaatggggataggaatgtccaccacacatagggcatgtgagagaaggcctgacctccatcagaggacctcactcagcccttggcacagtgggcacttagtgaattctggcttccttcaaccagtttccagctgttctatccccttccattctctcagtgggtgaaatcgaagagactgaggacaataaagaacaaggaaccgaactgccggacgtggtggcatgcacctgtaatcctaccactttgcaaggccaaggtgagaggatcgcttgaacccaggagttccagagcaacctgggcaacatagtgagatcctgtctctattttttaaaaaagaatgaaacataggaataagatgtgggtgaaggactcacatgccggcttggtcccactggtctttgtggtgaaggaggggagaggtgagaggtgggtaatccggaaagagaaaagcaccccctccctggatgaaggctcttctggagagagtcaaagacaaataagggtggggcgcagtggctcatgcctgttatcccaacactttgggaggctgaggtgggaggaccacttgagcccactagttcaagaccagcctgtgcaacatagcaagaccttgtttctagaaaaaaaattaaagattagtcaggtgtagtggtgcatgcctgtaatcctagctcctcaggaggctgaggcaggaggatcactcaagcccaggagtttgaggttacagtaagctatgatcatgccactgtacccccgtctgggtgacagaacgagaccctgtctcaaaaaaataataattccaaaaacaaatatggagacggaaattgagcccccctagactgggagcccccactgagttcggaaattaggctttacctccagccctggggtgccaggcaggagaaaaccatgtggtaggctgagggggtagggtgacccattggggtgacctagatagggccttgggtcaccctctgcctcctccagcctgtggctgaaagtcagccatgaagtaatgggggacactgttactcatcccagaagcacccacacttactcacttttgggaagggggacctaaagtgtgaaaaaaaggtgaggattttccgtctcaccctaaatgggacaccctaagtggggcatcggtttttcctcctccccagaacttcctggtgttttcaggcaccacaggctccttcctgccatccccatctctctctaatattctccccttctttctccttcagcctcctcccttcagaccccatgagccttgaattaagctccttggaggagaagagttgactgtcgggtaggagacagagaggccttcaggcagctctagggggagaagtgcggggcccctccaggcttcattcctctgtcatgataggggcttactctgctgctgggcctttctgagtggtgcttgctgggctctgtaatgacccctctcactgttggggggtacccaagagaaaagagtatggtgcagagtctggttgggaccatgtggccctgaaaatcaggatgcctagagaagcttcggagtttgagaagtcccccttcctcccaccctccaactgggctaatggtggggcctggccattcagaggcagggagggggtgggacaggcagaccatcatccctaggagcaaaggccatacactgtgttgtgatgaattgtttcaagcaaccagaagagtactgagaatatttaacccgcacccgtgcacccaccctgaattaagacgtgtgtcgcaactcagcatctttatcggcagcactgaagctttccattctttattttcatcaggttcaaaatcaatttccaaacagtctcctacatttttcccactgccatggggtcctgggcgtccgggcccccaatattcacgcactcgcaccacgcactcatattccctcaccccaccatcacggccccaaagaaggtcttccctctcgcgaagtccaccatatcggggtgactgatgttgacgtacaccctctcgcccctccggagctgcaccaggccgccgaaccccacgctcgtgtaccagagaggcccgtacccttgtctcctggccgggtccagcactggagtcaccgtctcggcgccctcgagcagcagctcgggagtgcccggcccgtaggcgccccccgcccggtacagagagctgcgcagcgtgaccgagcggccctgggggtccccgccgccagggggcgcccggccccggtagccgacgagacagtagaggtaatagaggccgtcctgcgggagcgccagcccctcggcgtccgagaactgcgtcccgctcgtcagaaacgcctgttccttcgtcgtctcccagcctagcccctgccccttcagcggagcgcctgcggagacacgggccgacgcgctcttgggaatgcgatcctaaaggcttgggacttctggggaagtggcggcttttagcccctgcgggagccgagccgggccgggggaggagggatggtgctgtttctgggatgagtgcgagttgggggccgagggaacacggatgtggggtgcagaacgctgtagtggggacctccaggccggcttttgcttgcaccggagggaagaagaaactacactgcggggacgagcgtaagagtgggcacgagcgacaaaaggtcgtgaagcgggtgggaaaccgagcactggaatcatggagccgaaggactctgggcgagcagaactggaaccttcggattatttacactcttattcaggtcttggaggtccttacctatgaggtgggcagctgggagcccggggctgagatctgtttctggctcctcctctggcagcttctgaaaccctggaaggggcaaagagtccacgattgggggcagggcagccacccatgcaggctacccttgagagaacagggcgcagggatggggagcctggattcctagaggaagaggtatctggggacgcagcagggagctgggagcccctgagggtctgaagcggggaaggagagacagtctgctcttacccagtccttgctgggcctgtgccccggggtcggccgtctccgttacctggttgggtggggtcacagtgcccagagttcagattcagctcatgtcacccctacccctctgaaagtggacccaagctgcaggcctggggtttctcctaccagcaccatccccaacacacacctccttagaagggagaacaagcaaggcataggtacttgggcggagaaacagatgtacctcgggaagaggagaggagacacaaggggcttatgtcgggacacaagcacaacatcacaggaacatggaaagagagtcagcaaagagacaagacatccccaccagggacagccgagccagctgagccagagggggcaaaagaccacaggcacaaccagagggagccaagcatccgcaagatacaactctccaccagggcctgttgcagccactcaccagtcctccctgatcctggggcactaaggccagcacagccaggacagtgataggcaccgccagcaacaaggtcaccagagaagtggctcctgccacagctagcaggagggaacccctcccctggagcctcccacccctgccctccagccccagtgcccccattgagactgaaccagagccagagcagggggctttcatacctcagggacgggcccaccccctccctgtagacctgcacacctggctgggactttccgcacacccctgctcccctcacccagcttcctgtttacccagagctggggtggggcagctggatgcctgggttctctgaactggggaagaagttgaggttagggagacaggctctcagggtggaaccaaaggggtctttagacatcttctggctcagcagagagagaaactgaggcccagggagggaaggtagcttgcaggaagccagtcagcagagctgaaatgagaacacagatctccaggtttccaatgtggtttgcattcttctataccctcaaggtaggtgctggaggaagagctgatcccgtctctgaggtcaagggccggactaggacaaggactggaatcttgagggatggatgtctgggttccctgagaagaactgattcccatactgggctgacctcctcccgttcccttgctcatctccagccccctgtgctgagtgagaaagggagaggtaagccttagcctcaccactgactactgactcactaaggagggatggaaatggagctttacctcccttgctacaaaaagtaaagacagatggacgaggcatactcccaccctcagagagcttccaagtctacaatgagccctatccattagtaggtgcttactaaatgtttatacataaatgaataaaaggacaaataaatgcaggaataaccaaaacaaagcagcaaggaccacatgaatggtagatgtaggcagcatgagtggttaagagtcaagggagtagccggggtagtggcttacacctgtaatcccaacactttgggaggctgaggcaggtggatcacttgaggtcaggagttcgagaccagcctggccaacatggtgaaaccctgtctctactaaagatacaaaaagttagccgggcgtggtggcacgcgcctgtaattccagctacacaggaggctgaggcaggagaatcacttaaacctgggaggcagaggttgcagtgagccaagattgcaccattgcactccagcctgggcaacaggctgagactctctctctcaaaaaaaaaaaaaaaaaaaaaaaaagagtcaagggaagaaagaccaggtccaaggaagctggaagtggctccaatcatctccccttcttggtaacatctctatgtgtttccgtaatactaataataatatagctgacccacaaaatgcacttaacatgtttatgccactgatttacacactttaataatttttttttttgagacagggtctcgctatgtcacccagactggaatgcaatggcaggatcatggctcactgcagccttgacctcccaggatctatggattcacctacctcagcctcctgaatagctgggactataggcacatgccaccatgcccagctaatttttgcattttttgtagagatggatttttgccacattgcccaggctgggctcaaactcctggactcacgtgatctgcccgtgttggcctcctaaagtgctgggattacaagcatgagccatcatgcccagccaataattataatcctgacaaaaaccctaagaggaaactgaggtacagagaggttaagaaacttatggagctcacagagtcagtggcagaaccagaatttgaacccaggcatctggctccagagccttgataacaagacagtttaaaaactgaatactggggctgggcgcagtggctcttgcctataataccagcactttgggaggccaaggaaggtggatcatctgaggtaaggagctcgagagcagcctgatcaacatggtgaaaccccatctctactaaaaatataaaaattagcggggcgtgg

SEQ ID NO: 99 - DNA, 20977 bp, Homo sapiens
aacagtaggctattagtggttaagtttttgggcagtcaaagttgtatgtgaattttcaactgtgacaaggggtatggggcctggtgcccctactccccttgatgttgaagggccaactgttattaactaatgcccataatttattaatattcattagttttctcctgatgtcctttattgatcccagcgttccattgagaataccatgtttgttgtcacgtttcctgaggctcttctagactgtggcagtttgtcagactttccttgttttcaataaccttgactgttttgaagagtgctggtcaagtattttaaatgtccctcaatttgagtttgtcttatttttttcttatgagtggatgagacattgattttaggtcatggtagtgtgaaccctgaatatctgagatggtctcagttaattaagaaaatttgtttgtcggggacgtgtgcccgtgacacagcctcagaaagtcccaacaacatgtgtccaaagtagttggggcacagcttggttttatacattttagggagacatgtgacatcaatcaacatatgtaagaagtacattggttcagaaaggcagggacacctcaaagcagggagggggcttccaggtcacagttaggtgagcgacaaatggctgcattcttttgagtttctgataagcctttcaaaggaggcaatcagatatacatctatctcagtgagcagagggatgattttgaatagaatgggagacaggtttgccctgagcagttctcagctttacctctccctttagcttagtaattttggggccccaagattttcctttcacagtagctagggaaaatcttatttttttctccctaagaaatatctatcagtaggaccttacagaggagatactgagtgccacggaataccaagtatccatcaagagtgtggtaacatgtggaagtagtttttcatggccaattttcattaatactagcataaaatctcaggtcaacacatgaagtttcagtccaaggaagaccattttctgagcaactaggttaatgcagttgactatttagtcttacagttgtctaacttgtctcatggatagaactcagaggaaaggattagtatctagatagtgacttccttagactaccattcccagtgtttaggagtaaaggcttagagtcaaactgctgggttcaaatcctgtctacacctcttctctaattctctgacgctgacatctcttcagggtggtgtcctaatctcatgatggaggagatgattgtacctgctgaagagagctgttgtatgaattagatgagacggcacatcataaataatcaacactgttagttaaggtagtcattattctttcagttgagccttctgatgagctctggacccatgaggattaagagttacactctcagatacatgcctgaagctcttgaagatgctgttgaatgtatttacatatgctttggaaatcaaatgaataggtagcagggttgataatctagtatgaaaattgagaagtcaaaccagtgcgctcttctagatggacagctacctgcctctgaatggggccaggcctttgctccacccacaggtagggttgggctttctgtaggaagcagcttagggtcagctgtgtcccctacagaggtccttggctgaatccccaatctcctgcttcacagcacaaacagattattttgtcctgaaagcaaatcatttgcttggtttcagaaaattctgtacaaggctcccctgatcatgagctgagggtttctctcaggattcctttgttttgaattagctgcaaatggtttcccattacaatctctattgccactctttccaggacaatgtacaggtttgctccatggaattattgagtcaattgaattttggaggaaattacccaaggtagccattttcatgaattatcaattattgttgacccatactctctgactaattaggttctaggacctagtcccttgagactttgaatcatgatatagagctacatcatctgtctttcaactacgcatggcaggaaggcacaaatccatttaatctaacagtgttattatattattagtataattatcaaggaaattctaagacatttactaacacttaaatgcttaaaatgttgcagttgtactgagatttgaatgttgccactcattaaggattgagcttacttagtgcttgagcccatggctgattttgacctgtagagattgaattatattttgtttttgagtccatgcttaagcttggagctactatattaatttttttagtattcagaactctgtgctttgtgggcacatacttcagtactttcattttataagtcaggaaacagagagtacaaaggtcatatatgtcatgaattagagtccaagttgatggtgggggttccaagtccagtttcttttaagtgttaacagctcaactatgtcttcagtgaatttgattcctcgctcaccttggcaatccctctcctggccccttttaagctggacatttctccaacattgtatttctttcagcatgttgctttttttttcttcctctttctgcctctgcctctgccagttgactttgaggcccttgaggggagtggctttgtctattattttctgcatatctagtagctggctccatagcaggcatagaaggctcccattaaatgcttatcaaatgaatgaatagatgaatggacacagcatgccagtttgatgaacgatcctcacatttgtatttgactgccaacattctttgtgccagggatttgccactagcctgtagtatggagctggagactgggctttcctttcttgggaccttgaacttgggtgctctgagtgggttcccctcttgtgtcacatatgtatgacatacttcagggtccctgttgagacctgcttagaaccactggatgtcataggtggaagaagccataaagagcatctagtgcaatcccattctttcacagataagggggctgaaaagacctcatatccccagctcttgtacctagccaagagctgcgatccagagggcagtcagatggactgatggtttgatttcatgtgagctgaagcagagtgactctttaatgctctttgaggccgtgggtggaagtgctgctttgctttgcaacatctagggctatgggcactgaggtagatttgtcacctggagattctagtagaagtaatgacaattaccaactggtccttcttgctgcctcacgtcctgcccctcctcatggcctgtcacaaacaccttgcacaactgtccttgtcctccaaatgcacatggggcaactctttccatgagtcagctccactaagctgtgtcattactcaggctgtgtggcctcaggaatgtcacctggggtctgcaggattggagtggggcagggagctggagcatggttccctggtgaggctttgcctgggccgtgtgaacagggacaggccacattctgaggagcctggctctacgccagttcttgacccctgctctgcctctgaatctaaaattctcatatttgaaactgggtcaaggtaaacgtgggtgatgtgttggtggtagatatgatgatataaagactggagtgtcagagtcgatgttttaactccagcctgggttagacttcaggtgagtactcaacatatgactggagaaacacacttgtcatattttgatcagggctctttaaaggtgagtaagttggatgtgattttcattttgtattttgtactatatctttaaaaaatccaagtccggagagggtgaggacagagatgcgtacgatggagaccctcacactttgtggggacattagcactggggatcttctgaggccagggaccttttctttctcctcaaactggggataaccttaaggccaggactgtgtctctccactgcattccctctgcaggctccaaagggtggggctgtcttcttcctcatcccggggtctccctgaggtttgctatgtcctgtcttcacactggggcttccctggcagcaagggcttcctccaacaccggatgaagtctaggaacacttaggcctcaaattgaggaacctgtgatggacaaaaatagtagcatgcattacaaaagggcagaattgtcattttccttctgcctctgtggccagcatggcaggcatttggcaaagggcaaggggaggcatggttccagcatctggaatcatcacactgactttgtgtatgtatgtgtgtgcgtgtgtgtgtgtggtatatggtgtgagagagtgcagtgtgtgaacctcatgcaggtgagtctctggggggtgacggggaagaggtgctccctcttctaggaggacatggtaggggcagagaagcaggcatgggctgagtaaacccatgcaaagtctgattagggcttaaagtgtgtttgccatctgggcctgactcagcctctggtgtcaaaggttcaggcgaggttgctttgtgaacagggtggagtagtccgggtccacttgtggaaactctataaatggaagcctgggcttcggtgttggcttccctcctggtttggggaagtgctgctcagtcctgcctcctcccactcaccttcccacacctggacacctgcagccaggcatctttcatgaaggcctcttctgtcctagagtaggtctgagctgggattttctttgagcagcaaaccaatccagctgcatccaggaaccccacagaccgccctgcttggtacctccctttgctcctcagtccactctgttctgttctggcctctgtgtccccactcaggctgtcctcatcaaggtcaccagccactctgcatttcttgaccagttagtattggttgactccattgattttccttcctttcttggacacctgtcttctcttgtctttccagtctccaccctcctagtttctcttccttcactgaccgctctttgtcagctggctgtacaggctccttctgcgctgtccaaccttgagatcttgtggagtcctcagctcggtagggccctctcttcttctccttgggtgatctcagccactcacatatctttaaataccttctatgtgatgacagctctcaaatatgtacatttttggcccagatatctctgagcttcagacatgtacccacatatctcctagtcctcacctctctgcatccacctagtggcctaagccataaacttgggagtatttctgccttctttctcctcctttaccccacacattgagtccccctgctactcctgttagttattcctccaaaacacttagcgtcaccctcttgtctttgtctccactgctgccatctaccacctttagccataactctagtagcaggtccttcctctccctatttcatgcttcctccaacatccagcctttatacattttgcagatggaataatcttttgaagctttgaatcaaataaaaagcctctactgagaccccttcggggtcttcccgatgcattttgaaaaacatctgaacagtatatacatgttgtctgaggtttgatgggatacatgctcaggcaggtgtgtgtttatgcctgtgaacaaacctaaacagatgcaggtgcatattcaccctggccacaatgtgcccaccccaagatagccctattgtttagggtctgggacccatcagtgtctggcatcatgcttggcattaggtgctcagcaggagctcagtgaatgaataaatgagcttttggtgtcctctaagtgtaaactccacaaaaacagcacttttggtctgtttactgctacatctccagcacctaaaggaaagcttggcatacagtagctactcaacaaagatttgttgaatgaaaaaataaatgaatgagaacacaatgagtaatctacagataggctttgtcattctggctatttaggaatcaaaggtaatgtgttcagtgacacttttgtcagtcaattcacattcaagaaaatgttccctcagatttcctctcacctccagcacgctgccattgccaccatcatgtaacccatcatttctgttgctctcacctcagatcggcctttccacattacccgagctaaagagcacccctcttccctggtcattttgtttcattttcttcaatttcttatttatgcatttgctgagttgctttttgtctgtcttcctcctcatgtgagctctgggaggcagggattctgtgtatctggttcgctgctgtaactccagtgcttggctcataggagattctgtgtcacttactctcacataggagaaatttgttttaagggaacaatagaagtggtggagtctagatttgaattccagaagtctgattcctgagcctatgtcctgaaccattattcgtgttgctcccaccctataagtaatgtaactctgtcttgcacatatagccttcctctgactctgttagatgctgcatctctgtactcttgtcttctccacatggagcattgactggacccgagtgtgtgcggccatctccaactcaggccagactgggtgtgattagtagaaggccaagtgcctctatggccagcaggtggtgctgttgggaagagaagagaaaaggggtccccagcggcttctaaaggagggaggactggttatgaggctggcttgggaaccgggtgatgagggaggttgagttgagaaggccctgccagctgaccacctcttttctttcaaccatgaatggcggtggtggcccccacgataccacagtcaccaccatcacccctgaccgacaactccagaacaccaagctcccctctgagctggccctacagggcgagtggccagactctcacatgctcgtcagttgagacagggtctcaaggatgtaacccaaactatacattcatttagtgtaaaggttattccttcatgcattatcccctggataggcgaccttaggggatgcctctcactccctaccctagtttttgatgaactcctaagccatagattcagttttagagataagtataatagtccttaaagtatgatattaaacatgacagagagtgtgtcatcaaaggtatttcccctgggttaaagcttgtatttttaaaccaagaatatgggcattggaatcagatgagctgggtttcagctctggcattgatacttactggccggataatcttggtcaagctgttaaaccttttgggtcctcagatcatttatcattcattcactcacttattcccatgtaccaggatctaatggcaaaccactgtgccttagaagaagagaagtgagtgggaagaggttccagtatttgagcaatccctgggtgaccagcctggctggaccctcccacccccatgcctgctctccatgttgtcactcagtgtgggcacttcctgatcctcagtggcattcagcattttgcacactctctccttcctgacttttctcttaaatcattgactccttcttaatcttttgccaagggctctctctcttctcaacctttagctgttgaggtttctcagggcatggtcttaagttcccttcttttcttaatctatattctgtcactggatgatctatacaccccaaagctagaatgctacccctacgatgatggctcccaagtgtagatctccattcctgaatttttcccgcgctcctgactcatagatgtaagtgcttactttgtatctctgcttggttattctgtatgcgtctcaaaattgacaggttcaaaactgagcccctggtcttcttacctggactgcacccaaacctgttcctccttcagtctttcccagctgcttctggaaatggtggctgctgctgcacagagacttggctatagccatggtgtccccagtggctcccgcttcacctcttgcttgcttcctctaatccattctccacactttaactagagcaatatttacaatctgcaaattgaatcttgtcactctctgcttaaaaatctttaatgcttcactcttagggcaaaagtcaaaacctgtcacgtggtctcagaggcttgtggggtctgctcctgcccacacacctcctgtccctgtctggggacacagtccctctcactctctatctttgtgtctgagacaacaatcaggcttttcctatatcagaaccatcttttgttttcactataatttttttctttttgtcacctggacaactcctgctatctctccagtttcagattaaattttattttcccatggaagattttcctgatctctaatctaaattaggttctccaattcattattttatataacctagaactttcttttgttgaatgtaacaaaatttagaattatgtatttatttttgtgtatttcttatattgattgcctcttttactagctcatatgctctgagtgcagggactgtgtttgcttatttatcattgcatacccaatacccagtatagagcttggcatgtaataggggctcaaaaatacttgctgagtagtagattaatgaaaggaagtttgccttgatattagactgaactttgccgaatgggaatagattttgaatgctcgcatcagctttggagggtaatgtgaagagcatccaaactaggctatctcaattgttatctctgagatctcgcgtaggttaatttctttgagccttagttttttgtctataaaatagtcatattaatatgacctccttcttttgcttgttataacggttataatagcagctaatatacataaagtgcttagaaaatatctgccacatagtattcaccattattatcacttttaatattattatttccactctcttcctggtgcaggaatcactctacaatacctttggcagatagttttgccatcctagtgatggggaacactcctcttgaaatctctagctacttttaatgaaatccaaactatttactatagaattggcttcactatcatgtaaatctatgttaatagtaactatctgctaatagtaataatcatattaacccttcacattttacaaattactaaatacttccacaaatacctcattcgatcctgaggacagccatctaggatgggtgggtgatcatcagtgcaattttacagatgcagaaactgaggctgggagatttgccaaagatcatgcagcatttacgtaatccaggacttcattataaaaaatctccagaagagctgattgttcactgagggtgcataaaactattcattgggagcagaaagaaaaaatttgaattttttctttatgtatttttatcttttcttttaaaattgtctgtattttgtgtttgtcttttaactttcatgatgttagaatgacagtacatatctattgcttctaaataatatgtatgtattatatgatgaaccccaatagaactttcaactctttattaaaatatgcattcagaaaagtgcatatattgtaaatgtccacctcaatgaattttcacaaactgaacacaaccagataagcagcccccagataaaaaaatagaatgttaccagcaacacagaaaccttccttcttctcccatccaatgaccacgctactacaaccaacacacacacaaccacgttcttactgtctacaacagagatttatttggccagcttttgtactgtacataaatgatataaatggaactatacagcgtgttttatgttgaaccctatgaacagtttttgacctccataaatggcaatttcatatgtttcatcctaatgcttttttatgtgtcttttttttggccacttactttatgtttgtgagattcatccttattgctgtgtgtagctgtagatcatttgtatacattgctgtatggaattccattgtctgaatataccaccgtttatttattcattgatgggtatttgtattctttctgatacttggatattatgaataacactagaataaacatttttttttgaaagaagtaagccttcatttctttgttttgcaaataaagctggctgagttggttgccttttggtgattagtcaaataggccaaatcccatattctcatccaactcctccaactcttcttggcttcagccttggctggagctgcagcaggagcagcagtggtggcagtggccccaggggcagcagccacaaaggcagatggatcggccaagaaggccttgaccttttcagcaagtgggaaggtgcaatcagtttccacagacaaagccaggacttgcttgtacccattgatggtagaatgaggtactgatgcaacagttgggtaaccaatctgcaggcaaacactggcaacattgcggacaccctccaggaggtgagaatgcagtttcctatgtgatgtcaagcacttcagggttgtagatactgctactgtcaaacagctgctggataatcatcccaaaggagaagggagagatgttcattcagcatgttcagcagtgtggcttcactggctcccactttgtcaccagtcttgatcagctgcacatcactcaggatttcagtggtgatgcttaaagcctggaaaaaggaggtcttcttaggctccagaccggtgttctggcctgggacagtgacttcacatggggcaatggcaccagcatgggtggcagctggcaccttactattcagcagcatgtccctgaacttagtgaggtcttccttggtgaacgcaaagcccacatttccctggatatgaggcaacagtttttccagagctgggttgttttccaggtgcccttggatggccttgcacatcatggtgttcttgcccattggcaccatggctttccctcagagggacatgtggatctgctgcatctacttggagcccacattgctgcttctacaatgaaacatttcagataatgattgaaaaattggatgatctgaaggaagtagttggacttccaggttgccctgtattccctgggcagcctggcagtgtgtcaggggttgccatgcagggtttaaaggtgatgccactttcacaaggatgcctgatgagagctagaatgaacattctaatgtttgagttttggtgaccgtatgcggggcagatgcctaggagaggaattgttcagtcattggctgtgtatacattctactttagtcatgaccgtcaaagagttttccaaagtggttgtaccaatttgcactcccacaacctcacccacactgtgattctgtcttcttacttttatcccctccagtcggtgtgttgtggtatctctttgaggttttcatttgcatttctctgatgaataatgagaggttgaacaccgtttttatatgtttattggtgaggctgaaatatttttattaccaggatgtgcaacataaaaacttttaggacttgggaattgtaggatattttctctaattgcttagactagttttttcttagaccattgtaaggaaaaggaagttccatcttctggtgctgggacagaaaaggggagcatatgaaagggaggtgaggacctccgcttttcatctttgccagagtctgctccgggtttgacaagaagcgtgttctgtacccaacagccagttttctcctgccttgctgtgatgttccccaaccctggggcggacatcccttcagggactggctgacaaaggctattttactgtattcagagagaagcaaaatcttgtggtaacctataagcaattcaagtgcaagagtaggtgataattaaagattaaaagcattgcatccacacttcctataatctcagctacttatttggtctctgcttgcatatttcatggatggtgggatcactacttcatgagcagctcatttcatttgctgggccattttattcctgatatgagcagaatctgcttttctgtgcccagaactcactgatccatgctattctccttgggatcacaaagaatatatccactgcctctctctttgacatttgacaggcctgaagacagccactgtgtgtctctaagtctcctcatctctggatgaaacgcccccttccttcagccacagctcatgtgacaaggtgcccagagacctcgctctttttctcacattaatttggatgaactaaaagttggccagggtctaccttcaaatgcagcatccgagttaaggctccaggggcagtctgacctgcagtactccctgtacctgctgttctctttgcgctgatacttaccccgatcccacatggatggctcctcctattgttcatgtcgctactccgacatccccatctcagatcggcctttccacgctacccgagctaaagagcacccctcttctctggtctctcctcaccactttgtttcattttcttcattttcactttcttatttatgcatttgctgagttgctttttgtctgtcttccttctcatgtgagctctgggaggcagggattctgtgtatctggttcgctgctgtaactccagtgcttggctcataggagattctgtgtcacttactctcacataggagaaatttgttttaagggaacaatagaagtggtggagtctagatttgaattccagaagtctgattcctgagcctatgtcctgaaccattattcgtgttgctcccaccctataaatagtgtaactctgtcttgcacatatagccttcctctgactctgttagatgctgcatctctgtactcttgtcttctccacatggagcactgacggccggagtgtgtgcggccatctccaactcaggccagactgggtgtgattagtagaaggccaagtgcctctatggccagcaggtggtgctgttgggaagagaagagaaacggtccccagcggcttctaaaggaggaaagacaggttatgaggctggcttgggaaccgggtgatgagggaggttgagttgagaaggccctgccagctggccacttattttctttcaaccattttcagatgtgaggcaggtgtccgtaggagagaaggagagcaggagtggacaagtccagatctgctgtcgaataggggtggtggcccccacgataccacttctcctggtcaagacctgccagttcatgctgaaacaggcctaggctgggaacctgctcattgatctagtatttgatcacccctcaccagcccctgctgcccccacccctgctcatggagaatgtggctatggagggggcaggcagtgggaactaggcctcctgggtttacagttttccagaaaaatcccttgggctataagttcctccagcatggagggcctcatctgctttccctctgtgctcccccacctggaacaaagcatcatgtcttatacacacaggtgcttagggcaaccaaccatcccagtttgtcggggactgagggagttcccaggattcagaactttcagtgctaaaattgggacagttccaggcaaatcaagatgagctggttaccctatcaataaaagagattgtccaggtggtctagaagccagcaccccgctttgtctctgctcagggggcatgctggtggccagccgtacaggtgtctcagacctcactgtgatgggccctgtgaagtcaggcaagaacacagccagccccaggagctgtcatctgggctctcatgctgacaggagacatgtgtcattcaaatacaggcagctggtagagggctgcagacccctgcggccactgcagcacagagcccaagctgcagtacttaggagctaggctgaaaccatggagggcttcctggaggtcaggttgaaacccctggtttggctgagacaaacaggggagagtcctgggtgggagagaggaaggtgaaggcagaaaggaatctgcgatgggttgtcaggtggaagaacaggcggatcactttggtacagaagagaaagggtatctggatggtaaataaatgagatgtaaaagggagcgagcacactaaacccagctgggaagaacgagattagaaagcagtgaggaattactgtagggtgcttctcagggctgaagcatttgtgggtccaaaaacattaagaaaaccccaaatctgggggagcctcttcccatgacttacctgtcttcctcctttcttttagtttcaagccatggtcacacattctgctggtccccagaagtttgggccccccgaagagcctcccagcagtgttctggaagccagggaaacttcctgtctcctgagcttgcggtcaggtcttctgaatctcccttcgtgggaggctccctgcccctgggtcccatttccacgtacaagttacagttagaggagtcacagtatttgatggattgggaggagctggttgtcatctactggcttgcaaacctccagttcatgggacacagtgcatctaaaggcagctcctgtcgcagtccaatagatctcattataagaaagttcttaaactgagcccaatttcatgatttctgcccatgggtcctaactttgttctttggcacttcacaaaaatctcactcctccctcataaaagcacttaaaatatttgagttcagctgtcccactcccttgggtattttcttttgtagactaaatatttttcaactcttcctgatgtgaaagtctttcaggccactgctctgcttgcccacctcctggcactgtcgcaggtttccagagtctggcttggcatagtagtttctccataaatattttgagtgattgagtgaatccacagctcctcctgtgaattcctgtctgtttgtattttttcctcttggcatatggggcccacagatccactattgtctcatgttgagttaactgttagctagaacccctaacatccagggctttccttggtaaggcccctccctacttcctgaaaggctcagcacagaagcggcagctggggaagtctgaatgctgtgtcctagctgtccctgtggcctctgtggctgtggacctggtctgtgtcttaagagaccaggctgcagcagcagtggcccaggcagtggctggggcagacctctgtgaggatgaggaggtgtggaggttcctatgacagagctagatgaaggcctgctggctgcttggcgtttgctctcctatctgcaatctgcagacttgtccccttcctaaccgtagaggcctcccctgtaatcagcagatttcccctctctctgataagtctggactctccctgttcattagcctcgtgcttcctttaatgcctgggtgtctgatcttggactccaatctgtgcatgcctttgatgctggagaacaaagatgtttcttggacttgagccaagctggagaagagtctgtgaacagaagcttcactgataggaaggcctctctggcacatctccgcaggatggagctctgggagctgctggccctggggagcagctggtttattccaaggttggaaaatggatgagaaaacctatttcgactaggcaaggaggcaagagaactgtgattcaggcatctggagatgttcagggacttgagatatccaggaggttttcagaaaggtatccttggtgcatgtggcctgcagaagagacagctcgtaactctgcacagggatactgactgcctggttcaccactgtctctccagtacctggcatggtgcctgacacctggtaggtatcagggagcatgttttaggtggataaatgaatgaatgagtttctggaaatctcttctgtatgccatagcactttcattacaaaagtgagagctccattctggagtcagagggacttgggttagcatcctgacttcaccacttactggctttaggacaagttcctaagcaaatgggcagcacaggaactccccaaggctgctgttagaatccccatagagaatgtgcatggagttcagggcctggtccatgtcacccacagactcagtgaccctcagtttagccaaatgactgagacatagagctctacacgccctacaaggaggggctgtcccggccctccacctcttcctcatgaggattgagaagggagggggcacctgtagaatgggtaagaagctacatcccccctaggaagctggtccttggcatagcttcctttgggctcaggtcggagctcggggcactgccgagggagcagcctgtggttatttcatgtcagtacagtgccctctccacccgttcacaaaccccagtggccactgcctgtgtttcctccatgggtggggggcagcaggccggttacccaggccccaggcctacctgaaacctggccagatggcagggcagacagttttggtcctcgagtctgcattaatctcagaggcatgcttcgctctctcctttgacacagatgctatgtttgtaggtgttatgaattgatttgggatccctcttccacacatctcccctcctttccatttcagcctttccctttggaaagcaaggatcagagaggaaagatgctgtagtagaaagaacctggacctgaggttttgagtgtgggcaggtcctagccccttgctggattttctcatgtgtgaagtgcacaagtgggtgaacctaggatatgttgtgggtggggtggtctcagtgaccttcaggaagcctctttcagaactgctgttttatgcaccggtgaggtctgtgttttattcctgtttcagattactcccctcccccaccaaaggagaagacagttgtcacaaggacaatgaggggtttgatggtggagaaaagagagcacacgtcaagtcagatatcagccttaggatcagctttattatgtattttaccttcaccagggagaagaaggcaaggaagctggagaacagaccagcctgcatcacacagacacaaatcacatctctaaagagtgtacatggtgagaactaagggcccacattagaccagctatgaagcacagagattgacaagggcaccaaacatccatcttatctttcccttctggttgtttggattcaatcgtttacatactttcggttcattttaaaaaagcacaaccaacatttcaaagttcaataatttgctgttctttttagtgtacagagacaaaatcaccaaatttttgatttttgaaacaccgcaagccgctttgtctcaacacctgtggtggtggtggtggtggaggtggtggtggtggtgataagtggaaagtccatcagaattcagtttgttttgaggcttatttgagagcctgaaactctgaaagatgaatgaaggtatccttggctgttacacacccagagctgggtgaatttttgcaccaaggaagctgtgctaggcttctgtggtcttccctgacaaccacaccattcctacatttgagaccttccatcagactgctgagaacaatgcttattcacagagggtgatgaaatacagaaagaactgtcttcagagacacagaccaagtcctggaatgctaaggaagccaggaggcaagaaggtacattgcacacagaggtacccacagaagaaggtcaccagagcgtgggctggggtcagggtttcatctgctggccatcttcttgaacccagatgacatatgagcagctactttcccttgccaggggatgagcacttctcctggactttctgtgggcaaacctccacacattttgtctggaatagctcctggcatggctctgcacactgaggtggacactggtcttggcatggaggtaggtatggctcttggccttgctgtgggcatttttcttgacttgattcctggcactgagaaagacatacctcctgggcctgcactagacacttatcttggcaggggtgctggcatgtggggaggcacacctcctcagcctttgcttggcactgctcctgggtctttgggaggcatggagggggcacacatggctgcttgcactgctgctcactgaaggacatcctagggtgatttgcagagcctgaaaaaaacacaagattcgaaattatctgtattaaaaatatcagcatgggaactggggaatgaagggttgagaaagaggaatgaggagtggatggaagaactaatggaatggaatgaggagtggaagtaagaactaatttcttggctgctttttatctctttctcttttctatcctggctgcagctccctgtggcacctgtctccaaagtgggagtgttctcctggcctctgtctagacatccatagctccaaaccccagtcttaccacaggtttttttcccttctcttctagtctacgaatccttttgaaaatcaggtgcaagagactagactagataggcaaattctagtctggatagaatatacaggatagtttgtgaggcccaagaaatggcaaaccacttaaaaaatcagtagaaagtacagtccataagaggaacagaacagcggccgcctaaagacagagtaacagggagagagagggcacagatgccccacttacctgatcttcaacaagactcaacaaaggctgtggactgtgaagcccagcaaggtgggacttttatatgttgcttagtccagcctcccgcgggactgactggtcacatgggctgtggtactaattgtggagtcaccataacaagcttcctctgaaattgccgatggtttgagtcactgcttgggatgcctgttaatcagactgcattttggcctgtgggtcctcaccagacctcagcagggaggggcttctctcagatctctctcatcagaggcagcaggaaaagaatgttcataaagtgttatctcagtctgttcaaccaggattccttgtctgcccaaactggtacaggatgtggtgagagataagatccaccttgctcatctcatcttcaccaatgggaagattttatgcctaaggcctggggcctctctgggtcaagggcttgtatggcctgttgcagacacttcttcatcaagcctagaaagtcacccttcagatgcaaggatgaaggctcgtcctgtggttccaagcgaacaaagggctttcagcctgctgaagagagtgattttcctgcgtgatggtcttgagggaaattgcggttcatttgttactcttgggttgtgaagtggggtgaaggggaagagagaggaaggagaaggcagacaatcttcatcttctcaaccttgatttatgacacccttatgaaagtggagttactcacagagttttcatagtgaccaggagaacaggctggaacaaagttaacttgtctctttgccttctggaaaacgttttcttagaactcaagtcaataaaagtcaggggatgaaaggaaaagtttcaaagcaaacacacccagttttctctacctctactttctagtttgggctgttagtttttacctggtgtgttctccctgtgcctgtgggaatcctaagcattctgcaaagctttactcatgtctaccaccctctgagagcctttcctgattactctaaaccagaaatgaatccacctctttatgcactcccatggtatctattatttatattattcatatgacatttactattgaaattaggactttccagatatttatatatagatcttattttttcctgggttataagttcctagaggataggtactatgccataggtatagtaagtggaagatgatggaagacaaatgattattgatggggtaaatgtattaatgaaggaatacagaaggtggatgtgggagagctgggagtagaggaaaatctcatttaattgaaaatgggaaaagatttactttgaaagaagcccccatttccttaaaatggtggttctgtgtttgctgaagttgaccaaattcaagggtctttaaatatgatgatgttcccttcctttctccttaatttaaagttatgttctcacacacaggggcctgttgtggggtgggaggagaggggagggatagcatttggagatatacctaatgttaaatgacgagttactgggtgcagcacaccaacatggcacatgtatacatatgtaactaacctgcacgttgtgcacatgtaccctaaaacttaaagtataaaaaaaagttatgttcaatctcttaacttgaaggggtaggtttaagtcatttcctaagaagaatatttggctaaaatcaaaaatgtctcaaatgtttatataggttttggatgcttgatacctgaaaagtttttaaaaggtaagctggggagatcaggaagcatttttgacctttgagactggttctcagaggttaatgtgacatcaccatgagccccattgaggtcctggcagtagacagaggcctgagagtggaaggacttggaatacccaggtgtatatctgaagagaaaaagtcatttggggcatctgggagagtaggtgtagggtggggagactcatccttctttttctcctcctttttcatctcctcctttcaattctcttcctctttgtatttttcatcttttcttagaatgctgttgaagagacaaagcaactctcctgtgtcctagaaagcaaggaattcatcacagattttaataatatgttctttcagtcactcatggcccctatgtgatgtcgatgcatttcccttccaaaatgactcacagttccatggagaatatggccagaggtaagcccctgtgctccagaagaaggcctcttccttggttttgggtggaaggtcatggaaggctcctgggggaggggatgtctgtgctttgtcttaccggacagtatgagttacccaggcaaggacggtggacaagggcatttcaggtggcctctaggaaagaatccttgttgggaggctgttgaagtacagagatacaagtgaaatgaaaggatagatggaggccagcttaggaaaggaatgagcaagagactccgggaagagaccttcttagctgggatttctggaagtttcctgtgacaggatgcatgagatgaccttgctcatgtcatgtatgcctgtgactttggttaagccccaggacaaggagactaaat

SEQ ID NO: 100 - DNA, 201 bp, Homo sapiens
gtgcttgaagtttctccagtgagcaagtctactcaccaggattggcttcaggatgtccatgttggaacgaagtactcgctctgctgcagccagtttctccyttggtaggccacaaagctcagaaacttcttggtcaccaagttgaatcatctcttctgattttgatccattgcacagacttgtcaaatgtaactggtagcc

SEQ ID NO: 101 - DNA, 201 bp, Homo sapiens
ccaactttaccatgagttgaaagtactccaggaaacataaggattattgttcatcaaaaagctactagaacaaagacagcggtttaccttgacattatttytggtgtccagtcctgtcataaatcttcccaagctgttgagaaatcgatctgcagaactgtcctgtaaacaacagaaacctgcctcagttgtgactgttca

SEQ ID NO: 102 - DNA, 201 bp, Homo sapiens
tggatttaagaaccggcagcttagcctgaggaattgctgtgttctgtgggagcagggcaggttcataaataagtgcacagaggtcttgaaatacagggatyatctgttcttctcggaacatggatgtccttccagggatgtgcatctggccttgctgtctaagttccatcaagggagccttccgttctctgtagcgacaag

SEQ ID NO: 103 - DNA, 201 bp, Homo sapiens
tgaagagaacaattaattacctgtaagggttcttcatcagtgccaacaggatgacatgaaatgatgtactcagaagtgtcctggaatggggcccatgagayggttgtctgagagagagcttcttgtcctgtagaggcatttggattgagtcccggaccgtgtgggtacaggtgatagtctacatcttccctggggatgtga

SEQ ID NO: 104 - DNA, 201 bp, Homo sapiens
cctgcagggaagaggggccagggcccggctgtgcctggacccagagtggtggggaaggggggtatgctcataccttgcaggttgacgccccggggcaccamgccctgaagctccactgtgggcaggtcatcttccgctgcattagagttattgggtggaactgctcttctgcctccaaaggcggtcctggaagtttctgac

SEQ ID NO: 105 - DNA, 201 bp, Homo sapiens
ggatgtgactgggaagctctggtttcagtgtcatgtgtctattctttatttccaggcaaaggaaaccaacaataagaagaaagaatttgaggaaactgcgragaaagtgcgccgtgccatcgagcagctggctgccatggattgaggcctctggccggagctgcctggtcccagagtggctgcaccacttccagggtttat

SEQ ID NO: 106 - DNA, 201 bp, Homo sapiens
aaactcactttgttttttccttcaattagagcaaattgatttttattaacttcaattttatttcctccctggaagtcctccacacttctccattcttcacragggtatgggtttgtcactgagacagcttggctataagaaagagataacagcgcatattatgatttaatttttctttaattagagtcaagagtaaggaaa

SEQ ID NO: 107 - DNA, 201 bp, Homo sapiens
gccacagacaatagagcagtcttggcagctacatggtgctgtgacctcatccacagactcgtcacagcctttggtggcattgttcatgggctccatcccayggactggaaaatctacagaaaggaattgtgttgagtacaaatctcaattaaaaacatccaaaattttgtattatacttaaactcaaagaaaagcccactg

SEQ ID NO: 108 - DNA, 201 bp, Homo sapiens
ctcaactctgttctcccctaggggctccctggtgttggcctcacaccttcagctgcccagactgcccgtcagcaccccaagatgcatcttgcccacagcamcctcaaacctgctgctcacctcattggtaaacatccacctgacctcccagacatgtccccaccagctctcctcctacccctgcctcaggaacccaagcat

SEQ ID NO: 109 - DNA, 201 bp, Homo sapiens
aatcattatctgaaatgtttcattgtagaagcagcaatgtgggctccaagtagatgcagcagatccacatgtccctctgagggaaagccatggtgccaatrggcaagaacaccatgatgtgcaaggccatccaagggcacctggaaaacaacccagctctggaaaaactgttgcctcatatccagggaaatgtgggctttg

SEQ ID NO: 110 - DNA, 16 bp, Homo sapiens
cacggcgcactttctt

SEQ ID NO: 111 - DNA, 16 bp, Homo sapiens
cacggcgcactttctc

SEQ ID NO: 112 - DNA, 26 bp, Homo sapiens
tgttttttcctttgtcatcttatcta

SEQ ID NO: 113 - DNA, 17 bp, Homo sapiens
agtggagcttcagggct

SEQ ID NO: 114 - DNA, 15 bp, Homo sapiens
tggagcttcagggcg

SEQ ID NO: 115 - DNA, 23 bp, Homo sapiens
cagtggagacagaggatgtttac

SEQ ID NO: 116 - DNA, 19 bp, Homo sapiens
ggactgatcctttctcgag

SEQ ID NO: 117 - DNA, 19 bp, Homo sapiens
ggactgatcctttctcgaa

SEQ ID NO: 118 - DNA, 23 bp, Homo sapiens
caatatttgctgcacagagatac

SEQ ID NO: 119 - DNA, 15 bp, Homo sapiens
tggggcccatgagac

SEQ ID NO: 120 - DNA, 16 bp, Homo sapiens
atggggcccatgagat

SEQ ID NO: 121 - DNA, 22 bp, Homo sapiens
cccagggaagatgtagactatc

SEQ ID NO: 122 - DNA, 20 bp, Homo sapiens
acacttctccattcttcaca

SEQ ID NO: 123 - DNA, 19 bp, Homo sapiens
cacttctccattcttcacg

SEQ ID NO: 124 - DNA, 26 bp, Homo sapiens
gaatcttttccttactcttgactcta

SEQ ID NO: 125 - DNA, 16 bp, Homo sapiens
gcagccagtttctccc

SEQ ID NO: 126 - DNA, 17 bp, Homo sapiens
tgcagccagtttctcct

SEQ ID NO: 127 - DNA, 21 bp, Homo sapiens
catgaaatgcttccaggtatt

SEQ ID NO: 128 - DNA, 22 bp, Homo sapiens
cggtttaccttgacattatttc

SEQ ID NO: 129 - DNA, 22 bp, Homo sapiens
cggtttaccttgacattatttt

SEQ ID NO: 130 - DNA, 22 bp, Homo sapiens
gactgttgccccttatctatgt

SEQ ID NO: 131 - DNA, 22 bp, Homo sapiens
catgttccgagaagaacagata

SEQ ID NO: 132 - DNA, 20 bp, Homo sapiens
tgttccgagaagaacagatg

SEQ ID NO: 133 - DNA, 20 bp, Homo sapiens
caacagcccctctgtatctc

SEQ ID NO: 134 - DNA, 18 bp, Homo sapiens
gagcagcaggtttgaggt

SEQ ID NO: 135 - DNA, 16 bp, Homo sapiens
gcagcaggtttgaggg

SEQ ID NO: 136 - DNA, 20 bp, Homo sapiens
acaccacctgaacgtctctt

SEQ ID NO: 137 - DNA, 22 bp, Homo sapiens
cattgtcattgactttaccatc

SEQ ID NO: 138 - DNA, 22 bp, Homo sapiens
cattgtcattgactttaccatt

SEQ ID NO: 139 - DNA, 20 bp, Homo sapiens
gtgccatgaaatacctgaaa

What is claimed is:

1. A method for identifying a human who has an altered risk for developing myocardial infarction, comprising detecting a single nucleotide polymorphism (SNP) in any one of the nucleotide sequences of SEQ ID NOS: 59-90 and 100-109 in said human's nucleic acids, wherein the presence of the SNP is correlated with an altered risk for myocardial infarction in said human.

2. The method of claim 1 in which the altered risk is an increased risk.

3. The method of claim 2 in which said individual has previously had a myocardial infarction.

4. The method of claim 1 in which the altered risk is a decreased risk.

6. The method of claim 1 in which the detecting is carried out by a process selected from the group consisting of: allele-specific probe hybridization, allele-specific primer extension, allele-specific amplification, sequencing, 5′ nuclease digestion, molecular beacon assay, oligonucleotide ligation assay, size analysis, and single-stranded conformation polymorphism.

7. A method for identifying a human who has an altered risk for developing myocardial infarction, comprising detecting a first single nucleotide polymorphism (SNP) which is in linkage disequilibrium (LD) with a second SNP, wherein said second SNP is any one of the SNPs of claim 1, in said human's nucleic acids, wherein the presence of said first SNP is indicative of an altered risk for myocardial infarction in said human.

8. The method of claim 7 in which the altered risk is an increased risk.

9. The method of claim 7 in which the altered risk is a decreased risk.

10. The method of claim 7 in which the detecting is carried out by a process selected from the group consisting of: allele-specific probe hybridization, allele-specific primer extension, allele-specific amplification, sequencing, 5′ nuclease digestion, molecular beacon assay, oligonucleotide ligation assay, size analysis, and single-stranded conformation polymorphism.

11. An isolated nucleic acid molecule comprising at least 8 contiguous nucleotides wherein one of the nucleotides is a single nucleotide polymorphism (SNP) selected from any one of the nucleotide sequences in SEQ ID NOS: 85, 86, 87 and 106, or a complement thereof.

12. An isolated polypeptide comprising an amino acid sequence encoded by any one of the nucleotide sequences selected from the group consisting of SEQ ID NOS: 85, 86, 87 and 106.

13. A kit for detecting a single nucleotide polymorphism (SNP) in a nucleic acid, comprising an isolated polynucleotide which specifically hybridizes to a nucleic acid molecule containing a single nucleotide polymorphism (SNP) in any one of the nucleotide sequences in SEQ ID NOS: 85, 86, 87 and 106, a buffer, and an enzyme.

14. A method for identifying an agent useful in therapeutically or prophylactically treating myocardial infarction, comprising contacting the polypeptide comprising an amino acid sequence encoded by any one of the nucleotide sequences selected from the group consisting of SEQ ID NOS: 85, 86, 87, and 106, with a candidate agent under conditions suitable to allow formation of a binding complex between the polypeptide and the candidate agent, and detecting the formation of the binding complex, wherein the presence of the complex identifies said agent.
